United States Patent Application Publication US 2002/0137139 A1 - sequence listing, part 3

SEQ ID NO: 12896 - DNA, 387 bp, Bos taurus
  Clone ID: 55-LIB3058-023-Q1-K1-F12
gcgtcaacctagattcaaacttgatccttccgcaccgactagtagaccccataccatggcaacacttattctgattatctgctcaccccgtacactatatttcaatattacctgagaaccgaattacagctcatatcctgacctactactcaagcaataaagaaccatcccgatatatgcaaataggtccatctatcatgccaatcggatttataggatccatgagatgatcccaccatacatgcactgtcagaatagacctagacacacgatcctacttaacatcagccactataattattgctattcctaccacagctgacgtattcatacgattgtcaacacttcatggaggcaatatcaaacggcctgatgctatatagtgag

SEQ ID NO: 12897 - DNA, 253 bp, Bos taurus
  Clone ID: 55-LIB3058-027-Q1-K1-F12
acgtgttgcgcccccgctcgattccacgggtccacccggagctgagagcagccgctcctcaggaaacgtgcgttgtgtaccttgagcagcctttgggtggtggtgctggatgccgggccatgagcccctgttttgcacgggccactgcttctgatgagtttgaacacatcagcttgactttgaaaccaaaaatggtttcctttttcactgagaacaaaattgggcattaaaattaaaacacccctttctcatt

SEQ ID NO: 12898 - DNA, 168 bp, Bos taurus
  Clone ID: 55-LIB3058-027-Q1-K1-F4
cggtcgacgcacgcgttcgttagatcgcgagcggccgccctttttttttttacttttgcagaagaaactttagtgagcgagaactggaaggtactggaactttttgtatatatatatttttgttttctttaatgaaggctcaattacttgaaatgtaaaagcgttctt

SEQ ID NO: 12899 - DNA, 301 bp, Bos taurus
  unsure (34): unsure at all n locations; Clone ID: 55-LIB3058-028-Q1-K1-F4
ggattcccggtggaccagcgtccggacaaaggancgtcccactggacctgggagacgactgcagcctggccctggtctggcgcaagaacgagcgcctgcaggagttcgtgctggtggcctccaaggagctggagtgcgccgaggaccctgggtctgccggtgaggctgcccgtgccggccacttcacgctggaccagtgcctcaacctcttcacacggccggaggtgttggcacccgaggaggcttggtactgcccgcagtgcaaacagcaccgcgaggcctccaagcagctgctgctgtg

SEQ ID NO: 12900 - DNA, 256 bp, Bos taurus
  Clone ID: 55-LIB3058-030-Q1-K1-F4
cggatggccactcccatgctgatgcgggcgctgcccatggcaggcccagagcccatgaagaacgcctccaagtacggcaacatgacacatgaccacgtgttgcacctgctcctgaaggcagacccgctgaaggtagtcccgcagctgaaggggagcctgccagaaaacctgaaacatgttaaggactccatggatggcgtggactggaagctctttgagagctggctgcattagtgtcttttgtttgaaatgagca

SEQ ID NO: 12901 - DNA, 374 bp, Bos taurus
  Clone ID: 55-LIB3058-031-Q1-K1-F12
aatgacttcctcagctgcatgtcccggcgctcggggcttcctcgctggatcctggccgtgggcctcttcctgtccgtgctggttatgctgtttctgatcttttttatccagttgactgttcctgttcaatatctttattatttattttttgtattcttttgtattttttttatatatactgttttatttttattttttttttttttatttttttttctatttttttttttattttttttattttattattttttttattttttatatatttattattttttatttttttttttattttttttattttactttattatatatttttttattttgtattatttttttttttattattttttttaattactatttat

SEQ ID NO: 12902 - DNA, 269 bp, Bos taurus
  Clone ID: 55-LIB3058-031-Q1-K1-F4
gccatttccttctccaaaagtaggtatagagggaacgtatctcactatagaaaggctgtttatgatgtacagaaatcggttgcatttctttacactaacaacaaaatatcaaaaaggggatgtaaaaaaaaaaaactattaaaattgtgcccctcaaaataaagtatttagggaataaacttgaccaagcaagtgaaaggattacatgctaagaactattaaacatttataaaggaaactgaagataattcaaagtaattggtgagatt

SEQ ID NO: 12903 - DNA, 448 bp, Bos taurus
  Clone ID: 55-LIB3058-035-Q1-K1-F4
ctagacgtacgctctggtggctaaggggcttcatcccatttgttatgcgaagagccgcaggcggtcgccgactgcacagccgctcggggtttttagagcttcagctataaaaatgggcaggattttccttgatcatatcggtggtacccgtctggtttcctgtgcaaactgtgatacgatcctgaccaaccgttcagaactcatctctactcggttcacaggcgccactggcagagcatttctttttaacaaggtagttaacctacagtatagtgaagttcaagatcgggtcatgctcactggccgccacatggttcgagatgtgagctgcaaaaactgcaatagcaaactgggatggatctatgagtttgccactgaagacagccagcgttataaggaaggtcgtgtgatcctggaacgcgctctagttcgagaaagtgaaggcttt

SEQ ID NO: 12904 - DNA, 398 bp, Bos taurus
  Clone ID: 55-LIB3058-040-Q1-K1-F12
ctgcggtagtgtgcagactgctgtgagtcctcaagccgctttctctgctgtctgacccgctcggctccgcgatgccggtggaccttagcaagtggtccgggcctctgagcctgcaggaagtggatgagcggccgcagcacccgctgcaggtcaaatacggcggggcggaggtcgacgaactgggcaaagtgctgacacccacccaggttaaaaaccggcccaccagcattacatgggatggccttgatccaggtaaattgtacaccttggtcttgacagatccggatgctcccagcaggaaggaccccaaatacagggaatggcaccatttcctggtggtcaacatgaagggcaacaacatcagcagtggcacggttctctccgattatgtgggctct

SEQ ID NO: 12905 - DNA, 313 bp, Bos taurus
  Clone ID: 55-LIB3058-040-Q1-K1-F4
agcccaccatatgttcactgtcggaatagacgtggacacacgagcctacttcacatcagccactataattattgctattccaaccggggtaaaagtcttcagctgattggcaacacttcatggaggtaatatcaaaaggtctcctgctataatgtgagccctaggctttatgttgttatctacagtaaggggtttaactggaattgcattagccaactctaaccctcgatattggtcgttacgacacatactacggtggcgcacattttcactatgggtcatcaataggaggtgtatttgctattacaggggg

SEQ ID NO: 12906 - DNA, 414 bp, Bos taurus
  Clone ID: 55-LIB3058-043-Q1-K1-F12
cttggacagcaaagagatcaaaccagtttatcctaaaggaaatcaacacttaatattcattggaaagactgatactgaagctgaagctccaatggaatcggaatccaatactttggccacatgatgcaaacagtcaactcactggaaaagaccctgatgctgggaaagactgaaagcaaaaggtggcagaagatgagatggttagatagcatcatcaactcaatggacatgaatttgagcaaactctgagaaatagtggaggacagatgagtctggcatgctgttgtccatgggatcacaaagagttggatgtggcttagtgactgaacaacaataaaatgtgtaatatatctaataactatactcaaatatagtcccatttctccctattaatagctgctgtattgaaacctg

SEQ ID NO: 12907 - DNA, 390 bp, Bos taurus
  Clone ID: 55-LIB3058-047-Q1-K1-F4
aagtgctgcagtacttgtagagcacagtagttttccttcggttctgcacataagcacgtaccgtcaaccacgcccccacactggcagagctcagctgtcgatggagcaagtttgacatcagcctgtgatggcgaagcattccccgcgttgtgtcttgtacctcaatatctgatgctctaatggctactttgggttgtgtctgtaagttaaggccttggatgtgggttggccttgaataaaagtcttctgctgatgagagatacatgaggtcactgttgatcagtgttgctagtgagcttggccgatctttgttaaagcatatagggatggaaaggtgattgcctttttttcaaattacctcataaaaaaaaaaaagggggggccctttta

SEQ ID NO: 12908 - DNA, 324 bp, Bos taurus
  unsure (237): unsure at all n locations; Clone ID: 55-LIB3058-049-Q1-K1-F4
ggcgaagataaggagcctctgcagagttcctgccttctaattaatccagaaactggactcactaatcctctggaattggctggctagggagctgcagataaggctatttgctgctgagaagccatggacaatggaaaccatgcaaagctaaagaatggaggaaggcggttgccacccctgaatcctcgggctagggccgatgcctgggtgagaactgccttcttaactccttaacanaaacagccagaacgtgctcagatcttgctcagtctttattcttggtttcttgctgttatccagataagtaataaaaatcaaccacgc

SEQ ID NO: 12909 - DNA, 381 bp, Bos taurus
  Clone ID: 55-LIB3058-053-Q1-K1-F12
gcgtcgcgtgggcgcgagcgggcggcgctttttttcgttaaaccttatccaaattgggagaggagaatacttttttgaaaggtttaaacaatttattttgtcccaaaaatggagtccggagaaaaagcctcgcgcgttcccgtgcctttacccggcccgcacccggaggcgggaagggctgccccgccgtggcgttctcgcgctcagggccgtgtgcggtcaggcgcaacccggccattggcgccccggacccggtaaccaaggcgacagcccttgccaagctcgagagccaataggggcgtagccagggccgtttcaaaaatctaaagcaaacattaatcggggaaaaaaaaaaaaaaattactcccacgttgggggatg

SEQ ID NO: 12910 - DNA, 378 bp, Bos taurus
  Clone ID: 55-LIB3058-056-Q1-K1-F4
ctttgtatctcgcctatggctcacataccgccgggacttcccaccccttgcgggaggcagcctgacctcagactgtggctgggggtgcatgttacgaagtgggcagatgatgctggctcagggccttctgcttcatttcctgcccagagtatacaaagcggacgtggcacgcctggtggcccggccagaccccacggctgaatggaagtccgtggtcatcctggtaccagtgcggcttggtggagaaactctcaaccccgtgtacgtgccctgcgtgaaggagcgccttcgttcagagctgtgcctgggcattatgggcggcaagccccgccactcgcggtacttcattggctaccaggatgacttcctgctctacct

SEQ ID NO: 12911 - DNA, 442 bp, Bos taurus
  Clone ID: 55-LIB3058-057-Q1-K1-F12
ggcaactcctgtggaaccatcggactcattcatgcatggccaataatcaggacaaactggagtgcgaggatgggtctggtgtgatacaggatttatattattcagatattttgttatttttatttctttcttgatgtttttatttgatttttttttattttattgttttctttttattgtgtttttttttttttgtattatttttttgttttttttttttatttgtttatttttttatatattttaattgtgtatttttttttttatttttttttttttttttttttgttttatttttatttttttttttttttttttgtatttttttttttttttttattattttattttaattttatgtttttttttttctatttttattttattttatttttttttttaatttttttgtttattttttattttattattttgttttttt

SEQ ID NO: 12912 - DNA, 435 bp, Bos taurus
  Clone ID: 55-LIB3058-057-Q1-K1-F4
cacgagcctacttcacatcagccactataattattgctattccaaccggggtaaaagtcttcagctgattggcaacacttcatggaggtaatatcaaatggtctcctgctataatgtgagccctaggctttattttcttatttacagtagggggtttaactggaattgtcttagccaactcttccctcgatattgttcttcacgacacatactacgttgtcgcacatttccactatgttttatcaataggagctgtatttgctattatagggggatttgttcattgattcccactattctcaggttatactctcaacgatacatgagccaaaatccacttcgcaattatatttgtaggcgtcaatataaccttcttcccacaacactttctaggactatctggcatgcctcgacgatacttcgactacccagatg

SEQ ID NO: 12913 - DNA, 408 bp, Bos taurus
  Clone ID: 55-LIB3058-058-Q1-K1-F4
tgaagggttagactggcctttgtttttccataaatgctgaccgctgagaagctttagagtcttctcaagtagtttacgtgaggttagttttacttcataaggaaaaggaccttgagaaattattctttctcctcaaatttttcaataatggcccttaaaaataactaaatgagtaaaacgagcacatgactaaattagtaataaagatgacttggatttttcagagcatcctttccctgtaaacaacgtgcttagttcttaggactcctgaatctcaaggtacagtgaaggcgtggggaaaccacagagctcagacctccacctgccagcggacagcagagcttgagagagattcaacctccgttttagaattcatgtatccttatccctagtcccaccatgcctcta

SEQ ID NO: 12914 - DNA, 406 bp, Bos taurus
  unsure (24): unsure at all n locations; Clone ID: 55-LIB34-001-Q1-E1-F12
gacccacgcgtcagatcctgctgnactccagcacctgcctctacagtaggtacagatggcattgtcccaactcagtcccttctcagccatggagcttctcctggcctctgccatcttctgcctggtattctgggtggtcaggacctggcggcctcgggtccctcaaggcctgaagagtccaccggagccctggggctggcctctgcttgggcacatgctgacgttggggaagaacccgcacgtggtcctgtcgcagctgagccagcgctatggggacgtgctgcatatccgcattggctgcacacccgtgctggtgctcaacggcctggacaccgtccggcaggccctcgtgcggcagggcgatgatttcaagggccggcccgacctctacagcttcaccttggtc

SEQ ID NO: 12915 - DNA, 448 bp, Bos taurus
  Clone ID: 55-LIB34-001-Q1-E1-F4
atgagatgtcagtggccaagatccatgcagactcaccactggagaaagtctgtctcattggctgcggattttctactggttatgggtctgcagtcaaaattgccaaggtcacccagggctccacctgtgccgtgtttggcctgggaggagttggcctgtctgttatcatgggctgcaaagcagctggagcagccaggatcattgcagtggacatcaacaaagacaaatttgcaagggccaaacaggtgggtgccacggagtgcatcaaccctcaggactacgagaaacccatcgaggaggtgctgaaagaagtgagtggtggaggtgtagatttttcatttgaagtcatcggtcggcttgacaccatgatgtctgccttgctgtgctgtcaagaagcatatggtgtaagcgtcatagtaggagttactcctcatgcccaaaatatctc

SEQ ID NO: 12916 - DNA, 444 bp, Bos taurus
  Clone ID: 55-LIB34-002-Q1-E1-F12
cggtctagcttaccgggtcgactacgcgtccgcggaacacaggtgtcgtgaaaaccaccgttaaacctaagccaaaatgggaaatgagaagacccacatcaacatcgttgtcattgggcacgtagattcagggaagtctaccacgactggccatctgatctataaatgtggcgggatcgacaagagaacaattgacaagttcgagaaggatgctgccgagatgggaaagggctccttcaagtatgcctgggtcttggacaaacttaacgctgaacgtgagcgtggtatcaccattgatatctccctgtggaaatttgagaccagcaggtactatgttaccatcattgatgccccaggacacagagacttcatcatgtacatgattacaggcacatcccaggctgactgtgctgtcctgatcgttgctgctggtgttggtgaatt

SEQ ID NO: 12917 - DNA, 287 bp, Bos taurus
  Clone ID: 55-LIB34-002-Q1-E1-F4
acaaccccacaaaactttggcacaatgaagtgggtgacttttatttctcttctccttctcttcagctctgcttattccaggggtgtgtttcgtcgagatacacacaagagtgagattgctcatcggtttaaagatttgggagaagaacattttaaaggcctggtactgattgccttttctcagtatctccagcagtgtccatttgatgagcatgtaaaattagtgaacgaactaactgagtttgcaaaaacatgtgttgctgatgaatcccatggccgctgtgaaaa

SEQ ID NO: 12918 - DNA, 397 bp, Bos taurus
  Clone ID: 55-LIB34-003-Q1-E1-F4
tttattatcacgggatgtgggttcttccaagttctttgggtcaaggacctgagatctgaagggctgacttcacccagcttgggtgggagtgttgaggagtatccatccccctttagatctcaagccagagatgggatgccctggggagacccttagctacccttttccctcttctcccagtgctcaaggccagcctacagtcacacacgtcacccagacataaaggaaaagacacattttttaggaaatgtttttaatacaggaacattacagatgcaaaattttaaagaaccccccccatccctttgtgtgccccccactcttgcccccatttctgaggtgcactgggaggctccccttctgtttggggcttgatgacttttgttgtaattggagc

SEQ ID NO: 12919 - DNA, 412 bp, Bos taurus
  Clone ID: 55-LIB34-004-Q1-E1-F4
cggagagccggagccagatggacggccaagcccaggagccatggaaccgacgaccgagtcatgtggctggaaatactccttgcctcagtgctgggctttgtcatctactggttcgtctccaaggacaaggaggagactttgccccttgaagatggatggtgggggcctggggtgaggcccagagctggggaggataagagcatccgcccattcaaggtggaaacatcagattatgagattcatgacttacatcagaggattgacaaggtccgtttaactccacctttggatgacagtcgtttccactaagggttcaactccaactatttgaagaaaatcatcccctaatggaggaatgaatttgactggatgaagcacgttgagattctcaacatataccctcacttcaaga

SEQ ID NO: 12920 - DNA, 393 bp, Bos taurus
  Clone ID: 55-LIB34-005-Q1-E1-F4
gcgagcggccgctcgcgatctagaactagtctttggctttgacattgagttgtttcagagtgctgtcaaggtgggtctaatgcggaatggcatccagatccgggacaagcgagcagaagctggggatagccacgagcaggcttctggaagttccgtcttggagctggagaaaggggacagggtctggctggagtctaagctggacagagaagaatctgaaaaaggaactactcacgctgtgttttatgggtttttgctcaatggaaattaagacagctaggggtaactgcatgattctctccctcaagtaactctgaatttaagaaaagaagcttcctacatcccaaatgtttcatctagaactgttaaatgatgaacaaatcactaaaacag

SEQ ID NO: 12921 - DNA, 156 bp, Bos taurus
  Clone ID: 55-LIB34-006-Q1-E1-F12
aggacgcctgggtgagatgtgtagaataagtgcgaggaccccggcgccccgccgtttcccacgacggggcacgtgcggggtccgccagccttgcgggccaccccagaaaaaccaccactctgatcggttgttcaacgacccagtgaagcagcgggg

SEQ ID NO: 12922 - DNA, 357 bp, Bos taurus
  Clone ID: 55-LIB34-006-Q1-E1-F4
aattgagaagcttgatacacaaactcgtaacacgtgtctcaacgtcagacggaatacagtcgcaccacgtgtatcgatatctgcaacatgcctgaggtgtctggcaaataatgtgatgtcatcatcatgtcttgatgttcaatatcttaaatgtagttcattcagccttaagattctagctggccataaagtgtgtactgttatatcacttcggaaaaccgaagatggactagtgttcagaagcgtcaagatggtacttttcacataggcatgaatcttgatccagaaacatgaagacttggaaatactgcaattaatgcatactggaatacattgtgtggtgtaccaagtgaatat

SEQ ID NO: 12923 - DNA, 372 bp, Bos taurus
  unsure (328),(348): unsure at all n locations; Clone ID: 55-LIB34-007-Q1-E1-F4
catttccacaaggaaatcagatctacccaggctacattttgcagaatatattaccttttaaataaacatttattgagcatctggccagcatttacaaaggacattccccactgtcagaggaatttccactctagaggaaagaccggcatctatacccataactagagagtaaatgacatccccaaaagaaaggaaattgcagaggtaagggttggtcagtggcgagtctccacatctgaacgtcagcacaggttcttaaaggcttccctggtggctcagatggtgaagagtctgcctgtaatgcaggagacctgcgtttgatccctgngtcgggaatattccttgaanggggaaatggcaacccactccagt

SEQ ID NO: 12924 - DNA, 406 bp, Bos taurus
  Clone ID: 55-LIB34-008-Q1-E1-F12
cggctgcggcggcggcggctggttgggtgcggcgctgtagcgattgatctgctgctagcctggcggctgagcgtcgagctccagcccggcctccgcgtgcccctcgggctccgcacccctgatgctgctcgggcgctgagcccgccccggccgggacgatggtgaagtatttcctgggccagagcgtgctccggagttcctgggaccaagtgttcgctgccttctggcagcggtacccgaatccctatagcaaacatgtcttgacggaagacatagtgcacagagaggtgacctctgaccagaagctcctgtcccgacgactcctgaccaagacgaacaggatgccccgctgggctgagcgactgtttcctgccaatgttgctcactcagtgtacatcctggagga

SEQ ID NO: 12925 - DNA, 424 bp, Bos taurus
  unsure (411): unsure at all n locations; Clone ID: 55-LIB34-008-Q1-E1-F4
gtgctctgcactccacattacacaccggggaggatgaggcacgctgtccgcgctctgttagcctgcgcggttctgggcgctgtgtcaggcggaccctgagagaactgtgagatggtgcaccatttcaactcatgaggccaagaagtgtgccagttttcgtgaaaatgtgcttcgtatcttggagagtggtccttttgtcacctgtgtgaagaaaacctcacacatggattgcatcaaggctatctcgaataacgaagcatatgctgtgacgttggatggacgtctggtgtatgaagcaggcctgaagcccaacaacctgaagcctgtggtggcagagttccatgggacagaagacaacccacagactcactattatgctgtggcagtcgtgaagaatgacactgacttcangctgaatgagctc

SEQ ID NO: 12926 - DNA, 435 bp, Bos taurus
  Clone ID: 55-LIB34-009-Q1-E1-F12
gtttctccaatggtttctgcacagacccagctgaagagaggtgctggggtgggtcagaggaagtgatccatctcttaacataaagctgatgctctttaactgcgggaccagcagaagcagagtcctggaatggatttgaatagagagagcaggcctggcccgagatgagagtcctgtggccttcctctccgcctcccaccttcgtgtctcaaatacccggcggatttccagcttgaaggattgcatccggccagagctgtacgggcctgccaaagacgtgtgcatccagtgttctggctccctggttcagagactgcccttctagagggctctgtgcctatgccttgaaggaaatgaccatgggaagacaaatgtgtgtaaactattatcaataaataacacccagaccttccaaaaaaaaaaaaaaaagggggg

SEQ ID NO: 12927 - DNA, 440 bp, Bos taurus
  unsure (370): unsure at all n locations; Clone ID: 55-LIB34-010-Q1-E2-F12
ccgggtccaaccacgcgtccgacgccggcgaccagcatggaggcggcggcggcggcggcggaggagccggggcggcgggcggtggcggcggggagaactacgatgacccgcataaaacccctgcctccccagttgttcacatcaggggcctgattgatggtgtggtggaagctgaccttgtggaagccttgcaggagtttggacccatcagctatgtggtggtgatgcctaaaaagagacaagcattggtggagtttgaagatgtgttgggggcttgcaatgctgtgaactacgcagccgacaaccagatctacattgcgggccacccagcttttgtcaattactctaccagccagaaaatctcccgtcncggggactcagatgactcccggagcgtcaacagtgtgcttctctttaccatcctataacccatctattcc

SEQ ID NO: 12928 - DNA, 352 bp, Bos taurus
  Clone ID: 55-LIB34-010-Q1-E2-F4
tgacctcaccaacctcatccacaccaagttcccgcaactcctgtcaggcatccgaagcatctctgaacagaccacaacgggggtccacaacctgtacaagatgatggccaaagggatcctgaaggtgccggccatcaatgtcaatgactctgtcaccaagagcaagtttgacaacctctatggctgccgggagtccctcatagatggcatcaagcaggccacagatgtcatcattgcggccaatgtggcggtggttgcacgctatagcgacgtgtgcaagggctgtgcccaggccctgatgggatttggggcccgcgtcatcatcacggagattgaccccataacgcacttc

SEQ ID NO: 12929 - DNA, 419 bp, Bos taurus
  unsure (386): unsure at all n locations; Clone ID: 55-LIB34-011-Q1-E1-F4
actcgagcagggagctggtggctcttccatccccagaccagccaagcctgtgagtgacaccccagacagaggaaccagagccatgcggagtctcagcggactgctgttgttactgactgcctgcctggcggtaaacgccagctccgtgcccacattgcccgatgacattcaagtgcaggagaacttcgacctgtctaggatctatgggaagtggttcaatgtggccgtgggctccacctgcccatggctgaagaggttcaaggagaagatgaccatgagcacagtggtgttgaaagcggggccgacgagcaaggagatcagcgtcaccaacactcacaggcggaaaggtgtctgtgaaacgatctctggtacttatgagaaaacangcactgatgggaagtttccctaacacaaagcca

SEQ ID NO: 12930 - DNA, 407 bp, Bos taurus
  Clone ID: 55-LIB34-012-Q1-E1-F4
cccgatcaaaattccaatgacattttttacataaatagaacaaacaattccagaatttgtatggtatcacagttcttgattttaaactgtattacaaagtgatagtaatcaaaataggatggtattggcattaaaaacagacaaagatcatggagcagaatagagagcccagctgtacacctgcacttctgaggccaattactttatgacagaggagccaagaacacacacggggggaggacaggctctgcagtaaatggtatttgaaaatctggactcttatcttacacactgcttatttaacttatatgcagagtacatcatgcgaaatgccaggctggatgaatcacaaactggaatcaagactgctgagagaaatatcagtaacctcagatatgcagatgata

SEQ ID NO: 12931 - DNA, 358 bp, Bos taurus
  Clone ID: 55-LIB34-013-Q1-E1-F12
gtcgacggacgcgtccgagctttatccccccactggtgatgaaagtctgaaatgtacatttttcatgctcattcttatcaattcctgatcattttaaggctttttgattaaaacaaaaacaaaattaatacattatcctgtaatttatcttacctataaaaatgactcctatttaatgaattatttaaattttgaactattaagagacccctaaattattaaatgaaggaaacttacaaacaacaaaaggtacgaagtcactgcaccgaagtacttctcaagctgggagttgccaccatgaacatttgatggccttcctagatgacactttgttaaatcagcacatcctttgtcagac

SEQ ID NO: 12932 - DNA, 388 bp, Bos taurus
  Clone ID: 55-LIB34-013-Q1-E1-F4
agccagacgcgcgatcgcaggctgagggtacgtggttgccggcccggtctccgcagtccccaccgagccccgaccctcctggccgccccctcgccttacctcgtcgccatgcgcctccgccgcctagcgctgttcccaggcctggcgctgctcctcgccgcggcccgcctcgctgctgcctccgatgtgctggaactcacggacgacaacttcgagagtcgcatcaccgacacgggctcttctggcctcatgctcgtcgagttcttcgccccctggtgtggacactgcaaaaagcttgccccagagtatgaagctgcagctaccagattaaaaggaatagtcccgttagcaaaggtggattgtactgccaacacgaacacctgtaata

SEQ ID NO: 12933 - DNA, 408 bp, Bos taurus
  Clone ID: 55-LIB34-015-Q1-E1-F12
gaaacctccacgagagttggtactaggtgttgtacaaagccggaatcagaaagaatgccctgtactgaagactatctgagcttgatcctgaaccggttgtgcgtgctgcatgagaagacaccagtgagtgaaaaagtcaccaagtgctgcacagagtcattggtgaacagacggccatgtttctctgctctgacacctgatgaaacatatgtacccaaagcctttgatgagaaattgttcaccttccatgcagatatatgcacacttcccgatactgagaaacaaatcaagaaacaaactgcacttgttgagctgttgaaacacaagcccaaggcaacagaggaacaactgaaaaccgtcatggagaattttgtggcttttgtagacaagtgctgtgcagctgatgac

SEQ ID NO: 12934 - DNA, 399 bp, Bos taurus
  Clone ID: 55-LIB34-015-Q1-E1-F4
cccgtggactgtagcccgccaggctcctctgtccatgggattctccaggcaagaatactggagtgggttgccatgccttcctccaggggaccttcccagcccagggatcgaaccctcgcctcctgggtctccttcattgcaccggattctttaccactgagcctccggggaagccccctgtttatcatggacactcttctaagtgttctaccaatattaacttatttaatcaggttccagagagattcctggaagttgcgcagatcacattacgggagtttttcaatgccattatcgcaggcaaagatgttgatccttcctggaagaaggccatatacaaggtcatctgcaagctggatagtgaagtccctgagattttcaaatccccaaactgcctac

SEQ ID NO: 12935 - DNA, 420 bp, Bos taurus
  Clone ID: 55-LIB34-016-Q1-E1-F4
ggaaaatacctatacgaaattgctagaagacatccctacttttatgcaccagaactcctttactatgctaataaatataatggagtttttcaagaatgctgccaagctgaagataaaggtgcctgcctgctaccaaagattgaaactatgagagaaaaagtactgacttcatctgccagacagagactcaggtgtgccagtattcaaaaatttggagaaagagctttaaaagcatggtcagtagctcgcctgagccagaaatttcccaaggctgagtttgtagaagttaccaagctagtgacagatctcacaaaagtccacaaggaatgctgccatggtgacctacttgaatgcgcagatgacagggcagatcttgccaagtacatatgtgataatcaagatacaatctccagtaaactg

SEQ ID NO: 12936 - DNA, 397 bp, Bos taurus
  Clone ID: 55-LIB34-017-Q1-E1-F4
tgcaacccagcatatggataagcgctgtagcccacatctagtcttgtctgcagtgctttctgacaaccatagtgccacctacgctttcagtgagaacgattactggcgtctggacagcagccgggacgggtggcatagctggcgcattgagcatcagtggccccatcgtccctcaacagtggatgctgcctttctctgggatacaaagctctacctcagccagcgtacccagttatatatcgtcctgacaagggcacgctacactctcgtgcaagattatccacagcagctggagaacgcatttgggagccctgatggggtctgccttcattctgtggctgcagcctttacctgtcctggatcttctcagctctacatcatggcatgccagaagctg

SEQ ID NO: 12937 - DNA, 376 bp, Bos taurus
  Clone ID: 55-LIB34-018-Q1-E1-F12
actagaaataagtctcctgagagcggggcccactcccagctacgacccagcagaaagacaaggcacaccattgcccatagactgcaggatgagctcctggagtgagtggtcgaaatgtgacccttgcctcaaacaaatgtttcgttcaaggagcattgagatctttggacaatttaatgggcgaaagtgtgtggacgccgtgggagaccgacagcagtgtgtacccacagaggcctgcgaagaccccgaggagggctgtggcaacgatttccagtgcggtacaggcagatgcataaagaatcgacttcttgtaatgaagacaatgactgcggagactattcagattaaggatactgtgaacaagatcctcgtcccc

SEQ ID NO: 12938 - DNA, 430 bp, Bos taurus
  Clone ID: 55-LIB34-018-Q1-E1-F4
ttccaggccgacccacgcgtcagtattagccagttcctgtaagcatttccaccagatcttgaggcaaatcataaggaagctgtttcttttaaaataacaaaccaccaccaaaaatttaaatgtacataatagttaaatgtttggctgttcttattttttaaagggtataaacaccaaaaaaaaaaaaaaaggtgggagggagcaacattgtatgacgatggaagataagaaagatgcactttctgtaattttatcaaagcatttatgttactaacttgtgaaatccaatttgatttgaacttattaacaggaattcttatttagcacaaaaatatggtttactttaactgtatacttgctaaccagtggcctctcaaaagcacattttagatactgaaaatgaaagaaaatgcatctttaaacatatttt

SEQ ID NO: 12939 - DNA, 377 bp, Bos taurus
  Clone ID: 55-LIB34-020-Q1-E1-F12
gagctctccacctcagtgcgtaggacttccttgtggacttccaccttatattcagaatggtgttatatctcacaagaaagacagttaccaatatggagaagaagttacttatgactgtgatgaagggtttggaactgatggacctgcatctataagatgtttaggaggggaatggtctcgtccgcaagattgcataagcacaaattgtgttaacttgcccacctttgaggatgctgtactcacagatcgggagaaggatttctataggtcaggagaaaaagtggcttttaagtgtctatcatattatcagttggatggatctaatactatacagtgtattaagagcaaatggataggaaggccagcatgcagagatg

SEQ ID NO: 12940 - DNA, 425 bp, Bos taurus
  unsure (23): unsure at all n locations; Clone ID: 55-LIB34-020-Q1-E2-F12
aagctctccacctcagtgcgtangacttccttgtggacttccaccttatattcagaatggtgttatatctcacaagaaagacagttaccaatatggagaagaagttacttatgactgtgatgaagggtttggaactgatggacctgcatctataagatgtttaagaggggaatggtctcgtccgcaagattgcataagcacaaattgtgttaacttgcccacctttgaggatgctgtactcacagatcgggagaaggatttctataggtcaggagaaaaagtggcttttaagtgtctatcatattatcagttggatggatctaatactatacagtgtattaagagcaaatggataggaaggccagcatgcagagatgtttcctgtgggaatccacctcaagtggaaaatgctattattcacaatc

SEQ ID NO: 12941 - DNA, 430 bp, Bos taurus
  unsure (324): unsure at all n locations; Clone ID: 55-LIB34-020-Q1-E2-F4
cagtgctcatttgtaccaaaatgaagagcaggttggccaggccattcgaagcaagattgccgatggcactgtcaagagagaagacattttctacacttcaaagctttggtccacttcccttcgtccagaattggtccgaccagccttggcaaagtcactgaataatcttcaactggactatgtcgatctttatattattcattttccagtggctctgaatccaggggagacacttttcccaacagatgaagaatggaaaaccaatatttgactcagtggatctctgtcgcacatgggaagccctggagaagtgtaaggacgcanggctgaccaagtccatcggggtgtccaacttcaaccacaagcagctggagaagatcctgaacaagccaaggcttaagtacaagcccgtctgcaaacaggtggaatg

SEQ ID NO: 12942 - DNA, 422 bp, Bos taurus
  Clone ID: 55-LIB34-021-Q1-E1-F12
atcagctatattctcttttgctgtctctcatatagggttatcattaccatctttctaaattccatatatatgcgttagtatactgtattggtgtttttctttctggcttacttcactctgtataataggctccagtttcatccacctcattagaactgattcaaatgtattctttttaatggctgagtaatattccattgtgtatatgtaccacagtgttcttatccattcatctgctgatgaacgtctaggttgcttccatgtcctggctattataaacagtgctgcgatgaacattggggtacatgtgtctctttcaattctggtttcctcagtgtgtatgcccagcagtggggttgctgggtcactattttattataccaaattggttaagaaaaaatatttaactagttgaactcttt

SEQ ID NO: 12943 - DNA, 408 bp, Bos taurus
  unsure (267): unsure at all n locations; Clone ID: 55-LIB34-021-Q1-E1-F4
aacccacaaaactttggcacaatgaagtgggtgacttttatttctcttctccttctcttcagctctgcttattccaggggtgtgtttcgtcgagatacacacaagagtgagattgctcatcggtttaaagatttgggagaagaacattttaaaggcctggtactgattgccttttctcagtatctccagcagtgtccatttgatgagcatgtaaaattagtgaacgaactaactgagtttgcaaaaacatgtgttgctgatgagtcncatgccggctgtgaaaagtcacttcacactctctttggagatgaattgtgtaaagttgcatcccttcgtgaaaactatggtgatatggctgactggcggttaggaccaagaccctgaaggaaatgaatgcttcctgagcca

SEQ ID NO: 12944 - DNA, 441 bp, Bos taurus
  Clone ID: 55-LIB34-022-Q1-E1-F4
catgccaagctcaaaggcaaagtctcctgcaaaaagttcgacctccgggtttccatacgcccagcccccgaaacagtcaagaagcctcaggacgccaaaggttccatgatccttgacatctgtaccaagtacctgggagaccaggatgccactatgtccatcctggatatatccatgatgacaggcttctcacctgatgttgaagacctcaaaacgctgagcactggtgtcgacagatacatctctaagtatgagatgaacagagactccaacaagaacacactcatcatctacctggacaaggtctcacacacagtggaggactgtctgtccttcagagttcaccagtactttaatgtcggacttatacagcctggggcagtcaaggtgtactcctattacaacctgaatgaaacgtgtatccgcttctatcacccggat

SEQ ID NO: 12945 - DNA, 380 bp, Bos taurus
  Clone ID: 55-LIB34-023-Q1-E1-F4
gaaatccttataatccgtataaaaacaaggtcgctggtcaccctctggcacagaatgaacgttgtcttcacatgtttttacaggatgaaattatagataaaagctatactccatctaaaataagacatgcctgaaatttcacaagaaggggcggggaaaaaaaaaaactttccatgacttaatgattcatatgcaccagtgaagaagttctaactaactttagcatgctgcacaaaaaactggtataatatgccttcagtatactaacactcatacgctcaattttgttttgttttgttttggcagttgacaagaagttaatttgctttagtgaacaatccctcattccaacctttccaaaaaaatagctccttcctgcc

SEQ ID NO: 12946 - DNA, 369 bp, Bos taurus
  Clone ID: 55-LIB34-025-Q1-E1-F4
tttacatattccaaagatgatatttacagactgttgtcgtcatattctgctaagcaggaaaaaatgtttctgcatgtaaaagggaaagttcacctaggaagatttgtgatgagaagtcgggatgtcatgctgcaaacaactttcttggattctataaatactctgccgactacttacgaaaagggggaatattttgcatttttggaaacctatggaacccactacagtagctctgggtctcttggaggactctatgaactaatatatgttttggataagaagtccatggagcagaaagatattgaactgagggacgtacagagatgcctcgggtttgatctggatttgtctctgaaggttggagttgaa

SEQ ID NO: 12947 - DNA, 399 bp, Bos taurus
  Clone ID: 55-LIB34-026-Q1-E1-F12
aaaacgtaaactataacctaggggtttctgttggatggttggcaactaagaatggaggaagaacaacaaagacatgttctccactttcttatttctcaaaacaatgttatcttcgtctttttaatcttaggtttttaacagattaaacctttaaagcaagaagtgaattctgtcttttcagacccagaaatacacatgaatactttgctatgattacattttagatattcatttatacttttctatatctaagactcatatcttgatttttactatcatatatgaatgaagcctttatatcttgtttttttgccaatcttgaaagatagatgggaaaagataaaagaatgttgtctaactcttgattgcttagaaagtatttccatagtcaatgatggt

SEQ ID NO: 12948 - DNA, 407 bp, Bos taurus
  Clone ID: 55-LIB34-026-Q1-E1-F4
aagataagcttgggaaggtgaagtttgctgtgctacagacgtatggggacacgacacacaccctggtggagaagatgaactatactggccggttcctgcctggattcgaggcaccaccattcatggacccccaactttccaagctgcccagctgcagtctcgagataatcgatcacattgtgggaaaccagcctgatcaagagatggtgtctgcctctgaatggtacctgaagaacttgcagttccaccgtttctggtccgtggatgacacgcaggtgcacacggagtacagctctctgcggtccgtcgtggtggccaattatgaggaatccatcaagatgcccattaatgagccagcaccgggcaagaagaaatccagatccaggaatatgtggactataacgggg

SEQ ID NO: 12949 - DNA, 341 bp, Bos taurus
  Clone ID: 55-LIB34-027-Q1-E1-F12
attttaagaactttaatcgaaagttaaattgaaggtgctgtttgtagacacttaacacccatgaaagcccagccatcatgacaaatccttgagtgttgtcttaagaaaatgatgctggtcatcacagcttcagcatctcctgttttttgatgctcagctccccctgctgatctcagagtttcctggcttctccttgccccctctcacccctttgctgtactgtgtagtgatttggtgagagaaactgctgcctactcccccagcctacccccactccctgcattacacatgagtttcaagttttattattgcaataaaagtgctttatgctggcttttctc

SEQ ID NO: 12950 - DNA, 326 bp, Bos taurus
  Clone ID: 55-LIB34-027-Q1-E1-F4
gaaagacgggcccgagaacaggctgaggctgaggtggcctccttgaaccgtaggatccagctggttgaagaggagctggaccgagctcaagagcgcctggccactgccctgcagaagctggaggaagctgaaaaagctgctgatgagagtgagagaggtatgaaggttattgaaaaccgagccttaaaagatgaagaaaaattggaactccaggaaatccaactcaaagaacctaaccacattgcagaataggcagacaggaattataaaaaggtggctcgcaagttggtgattattgagggaaacttggaccgcacagaggaccg

SEQ ID NO: 12951 - DNA, 333 bp, Bos taurus
  Clone ID: 55-LIB34-028-Q1-E1-F4
gtccacccgcgcgtccggactcagtcaccaggcctgacctaggacagtgaatcgataatggcactctccatcacgcggggccttctgctgctggcagccctgtgctgcctggcccccatctccctggctggagtgctccaaggacacgctgtccaagagacagatgatacatcccagcaggaagcagcgtgccagagtattgcccccaacctggccaagtttgccttcagcatatatcgccatttggctcatcagtccaacagcagcagcgtcttcttctccgccgtgagcagtgcgttcggcctttgcgatgcgcgccctgggagccagggg

SEQ ID NO: 12952 - DNA, 410 bp, Bos taurus
  Clone ID: 55-LIB34-029-Q1-E1-F4
cataaataccttctttataattttaccttgggtgctacatgtccatgtttgaccttcctaggcaggtgtctgcagtggaggtgctggcatcttagaggtggggaagacaatttcagatttaacatcaacatctgggtgtcttctgcatacaaaactgggtaataagatacttaggcacgttaaagtaagcctccaattttgtaactttggttacaattttgggaaaattttggaaagataatttttagagttatggaaatttgttaatttttagaattatggagattgtagatgaagcatcttgccatataaaatttatatgttatctcctatatctgttagaaacttggttgtgcctggttttactatataattttggttcactaaaacaatggtaaaacattgtgtgc

SEQ ID NO: 12953 - DNA, 426 bp, Bos taurus
  Clone ID: 55-LIB34-031-Q1-E1-F12
ggtccagcacgcgtccggttctgaaaccctagaggacgcaactatagcactgcacactccagtactaacctgtccagagcagcaagtgagaggaaacaaaccagcattgtaagaggacatgcttctcctccctctctccgtgctgctcctgctcacacagccctggagatccctgagagcagaaatgacaaccttttctcagaaaatactggccaatgcctgtaccctggttatgtgtaaccccctggagagtggcttgcctggtcatgatggacaaaatgggagagaatgtccccatggagagaagggggatccaggttcaccaagacctgcagggcgagcatgaaggcctggatgggttggccctattgggccgaaaggagacaatggctttgttggagaacctggaccaagaggagacactgg

SEQ ID NO: 12954 - DNA, 307 bp, Bos taurus
  unsure (98): unsure at all n locations; Clone ID: 55-LIB34-032-Q1-E1-F4
gatgtgttgtccttcctgcaacaagatgattgtgacgcagctgtcatacaatgcaggcgccctcacctggctctcctgtgggagcctgtgcctgctgnggtgcatcgcatgctgctgcttcatccctttctgtgtggacgccctgcaggacgtggaccagcactgtcccaactgcaaagctctcctgggcacctacaagcgtttgtatgactcagccaggcctgaagggagccgtgtgctgcaagaaggcctctccgactcttcacccagcccggtccaaaagtgtggtcattcctgcagcagcatc

SEQ ID NO: 12955 - DNA, 385 bp, Bos taurus
  Clone ID: 55-LIB34-035-Q1-E1-F4
cccacgcgtccgcgagcggccgcacgcgatctagaactagtttcttgtcaagactgaatgctcttattattaagcaatgaagaagaaacaggatttttttatcatgaaaaaaagttggggtgttaccttcctgttattgatgacccaagaaggcagaagaaaaagaaagcagctcctgtagtttgtggagcaacagctgtggaacacttttttccatccagaattggtccaaacctgcctggaaagctcgctgagaaaacttcaactgagctacgtggatctttatcttattcattccccaacagctctgaagcctggagaggacccaatcccagaggacatccatgggaacatcacttttgacacagtggatctctgtatcatg

SEQ ID NO: 12956 - DNA, 404 bp, Bos taurus
  Clone ID: 55-LIB34-036-Q1-E1-F4
gtgtgggtgaactgctatagtgtggtatctgcccagtgcccctttggtggattcaagatgtctggaaatggtcgagaactgggagaatatggtttccatgaatacacagaagtcaagacggtcacaatcaaaatttctcagaagaactcataaactatgagagtacagagatgactcctcaatagctaagcatctcctgcagtggctaatatatcttagtggttttaaatgcaaaattgttctttccttgattcgttaaacataagctaatcatattagcattaatactacacatagaaaacttgacatgtatattattctgaaagaatcatcagccttctgctatgacacccaagccctccctgaaataaaaataatggacgtggatgcaatctctctagctc

SEQ ID NO: 12957 - DNA, 404 bp, Bos taurus
  Clone ID: 55-LIB34-037-Q1-E1-F5
cggctgatcctggagaagcagaagcctgatggaatcttccaggaggatgggcctgtgatacaccaagaaatgattggtggcttcagggacaccagggagaaagatgtgtcccttacagcctttgttctcatcgcgctgcacgaggctaaagacatttgcgaggcacaggtcaacagcctgggccgcagcatcgctaaggcaggagacttcctcgaaaaccactacagagagttgcgaagaccatatactgtggccattgctgcctatgccctggctttgttgggcaagctggagggtgaccgcctcaccaaatttctgaacacagccaaagaaaagaaccgctgggagggaaccaaccagaagctctacaatgtggaggccacgtcctaagccctcttggctct

SEQ ID NO: 12958 - DNA, 315 bp, Bos taurus
  Clone ID: 55-LIB34-038-Q1-E1-F4
atcaagggggacaaattctgggtatatcctcctgagaagggggaggaatatccaaagttgctccaagagaagtttcctggaatcccattcccactggatgcagctgtggaatgtcaccgcggagaatgctctcatgagggtgtcttcttcttccaaggcaaccacacgtggttctgggacttctctacaaaaaccataaagaaacgttcctggccagccgttgggaactgctcctcggccatacgatggctcaaccgctactactgcttccggggtaacaaattcctgcgcttcgaccccgtcacgggagaagtg

SEQ ID NO: 12959 - DNA, 389 bp, Bos taurus
  unsure (360): unsure at all n locations; Clone ID: 55-LIB34-039-Q1-E1-F12
ggtccacgcacgcgtccgtactacagtgactcacactgcaccaggtgaaactcgcacttacatatggaaaatcccagaaagatctggagctggaagggatgattctccttgtattccatgggtttactattcaactgtggatcgggttaaggatctctttagtggattaattggcccactgattgtttgtcggaagcactatttgaaagtattcaatcccataaagaaactggaattttcccttctgtttcttgtttttgatgagaatgaatcttggtacttagatgacaatatcaaaacatactctgatcaccctgagaaagtagacaaagccaatgaggaattcatggaaagcaatanaatgcatgctattaatggaaaaatgtttg

SEQ ID NO: 12960 - DNA, 408 bp, Bos taurus
  Clone ID: 55-LIB34-040-Q1-E1-F12
acgcggcccgtggcccaagactatgtggaaagacagcaatctgcctgcaaagagacaggctggcccttctgctctgatgaagactggaatacaaaatgcccttctggctgcaggatgaaagggttgattgatgaagtcgatcaagattttacaagcagaataaataaactaagagattcactatttaattatcagaagaacagtaaggactctaatacattgaccaagaacatagtggaactaatgagaggggattttgccaaagctaacaacaatgataatacatttaaacaaatatcagaagatctgagaagcagaattgagatcctgaggcgcaaagtcatagaacaaatacaacgtatcaacgttctgcagaaaaatgtcaggaatcaactggtagatatgaaa

SEQ ID NO: 12961 - DNA, 315 bp, Bos taurus
  Clone ID: 55-LIB34-041-Q1-E1-F12
gtcgacgcaattctctatactaagtcgtaataatcgccttattccagttggtaaattggtcttagaccggaacccagttaattactttgctgaggttgaacagttggcttttgacccaagcaacatgccgcccggcatcgagcccagccctgataaaatgctccagggccgcctttttgcccatcctgacactcatcgccatcgccttgggacgcacatatctccagatacctgtgaactgtccctaccgtgctcgagtgagcaactaccagcatgaccgacccatgtgcatgatgggacactcagggtggggct

SEQ ID NO: 12962 - DNA, 380 bp, Bos taurus
  Clone ID: 55-LIB34-041-Q1-E1-F4
cgtccgccagcactcccgactcctggagagagcagctaaaatgaacgatgcttttggtggtggctccttgactgctctaccagtcatcgaaacacaagctggtgatgtgtctgcttacattccaacaaatgtcatttccatcactgacggacagatcttcttggaaacagaattgttctacaaaggtatccgccctgccattaatgttggtttgtctgtgtcccgtgtcggatctgctgcccaaaccagggccatgaaacaggtggcaggtactatgaaactggagttggctcagtatcgtgaggttgctgcttttgcccagttcggttctgaccttgatgctgccactcaacaactcttgagtcctggtgtgcgtttga

SEQ ID NO: 12963 - DNA, 389 bp, Bos taurus
  Clone ID: 55-LIB34-043-Q1-E1-F12
cgggccgacccaagcgtccagagacagtcagtctatgtgggtgtcatcaaagcagtggacaagaaggcagctggaactggcaaggtcaccaagtctgcccagaaagctcagaaggctaaatgaatattagcgccaatacctgccaccccagtcttaatcagtggtggaagaacggtctcagaactgtttgtctcaattggccatttaagtttaagagtagaagactggttaatgataacaatgcatcgtaaaaccttcagaaggaaaggagaatgtttttgtggaccatatgttttgtgtgtggcagtttaagttaatactttttaaaatcagtactttttaatgagagcaacttgaccaaaaatctgtcacacaatttgagacccatt

SEQ ID NO: 12964 - DNA, 333 bp, Bos taurus
  Clone ID: 55-LIB34-043-Q1-E1-F4
cttcttatctagcaagaatgaacgcttcccgagaagtaaaatcggtagaacttcctaactgtaaattaataaaaggaatagaaactggtgctgaagacctggagatacttcctaatggactcgctttcattagttccggattacgatatcctggagtaaaaagctttgaacctgataagcctggaaaaatactgctgatggacctgaacaaagaggatcctacagtgttggaattgaagatgactggaagtaactttgatgcgtcttcatttaaccctcacggcattagcacattcacagatgaagataatactggtgtactgctggtggtga

SEQ ID NO: 12965 - DNA, 437 bp, Bos taurus
  Clone ID: 55-LIB34-045-Q1-E1-F12
caaaaccagacgagctactcacaaacagtttaccaagaactaactcatctatgtggcaaaatagtgagaagatttgtaagtagaggtgacatgcctaacgagcctggtgatagctggttgtccagaaaatgaatctaagttcagctttaaagataccaaaaattcaaataaaccccactgtagctttaaaagttagtctaaaaaggtacagccttttagaaacggatacaaccttgactagagagtaaaatttaacactaccatagtaggcctaaaagcagccatcaattaagaaagcgttaaagctcaacaacaaaaattaaatagattccaacaacaaatgattaactcctagccccaatactggactaatctattagagaatagaagcaataatgttaatatgagtaacaagaaaaatttttcccttgcataag

SEQ ID NO: 12966 - DNA, 275 bp, Bos taurus
  Clone ID: 55-LIB34-045-Q1-E1-F4
aagagacgcacgctgctgactttgtcttcgtgcagcccttatcactctctggagaactttctctcccctgggcacaatggcaactcttaaggaaaaattgattgcaccagttgcagaagaagagacaaggatcccaaacaataagatcactgtagtgggtgttggacaagttggtatggcatgtgccatcagcattctgggaaagtctctgactgacgagcttgctcttgtggatgttttgggagataaactcaaaggagaaatgatggacctgc

SEQ ID NO: 12967 - DNA, 435 bp, Bos taurus
  unsure (376): unsure at all n locations; Clone ID: 55-LIB34-047-Q1-E1-F12
ggcagcgccggcgtgacccacccgccatgctccccccagcgctcgtcttgctgttggggtttctctgccacgttgctatcgcaggacgaacctgccccaagccagatgagctaccgttttccacggtggttccactgaaacggacctatgagcccggggagcagatagtcttctcctgccagccgggctacgtgtcccggggagggatccggcggtttacatgcccgctcacaggactctggcccatcaacacgctgaaatgcatgcccagagtatgtccttttgctgggatcttagaaaacggaacggtacgctatacaacgtttgagtatcccaacaccatcggcttttcttgccacacggggttttatctganaggagctagttctgcaaaatgcactgaggaagggaaatggagcccagaccttcctgtcg

SEQ ID NO: 12968 - DNA, 431 bp, Bos taurus
  unsure (340): unsure at all n locations; Clone ID: 55-LIB34-047-Q1-E1-F4
cgcaaacgcacagacccacgcagttttatccggtaaagcgaatgattagaggtcttggggccgaaacgatctcaacctattctcaaactttaaatgggtaagaagcccggctcgctggcgtggagccgggcgtggaatgcgagtgcctagtgggccacttttggtaagcagaactggcgctgcgggatgaaccgaacgccgggttaaggcgcccgatgccgacgctcatcagaccccagaaaaggtgttggttgatatagacagcaggacggtggccatggaagtcggaatccgctaaggagtgtgtaacaactcacctgccgaatcaactagccctganaatggatggcgctggagcgtcgggccaataccgggcgtcgccggcagtcggagaggcgcgagagggacgggagcccggggcgcggggggct

SEQ ID NO: 12969 - DNA, 430 bp, Bos taurus
  Clone ID: 55-LIB34-049-Q1-E1-F4
atatgatccgtaataattaccgccgtactactactactctcgctccctgtattagcagccggcatcacaatgctattaacagaccggaacctaaatacaaccttcttcgacccggcaggaggagaccctattctatatcaacacttattctgattctttggacaccccgaagtctatattttaatcttacctgggtttggaataatctctcatatcgtgacctactactcaggaaaaaaagaaccattcggatatatgggaatagtttgggctataatgtcaatcggatttctaggtttcatcgtatgagcccaccatatattcactgtcggaatatacgtcgacacacgagcctacttcacatcagccactataattattgctattccaaccggggtaaaagtcctcagctgattggtaacacttcatg

SEQ ID NO: 12970 - DNA, 246 bp, Bos taurus
  Clone ID: 55-LIB34-051-Q1-E1-F12
agcgcacaggtcccaccgcatgtggtgttggcaccagccgggatcttggtgtttctggctgtgcttcttcccgcgcgggtccgacaagcgggatcaggtgccgctgaagcaacacaatgggagctccagtcaacgtggcagccaaagatgccaatttgtgggccttgcacgatacgatgctggcacagcccctgacagacaacaatgtcaaggttgacaatatcattaaggaagagagtgaccggc

SEQ ID NO: 12971 - DNA, 242 bp, Bos taurus
  Clone ID: 55-LIB34-052-Q1-E1-F4
cagacgcgtggggccccatggtgttatacaaccaacagcgaagtgaggtgggaatactgcacaatcccgtcctgcgagtcctctccgttatccacggaacgcatggatgtcccagtaccacccgaacaaactcctgtgccccaggactgctaccatggtaacgggcagagttatcgaggcacgtcgtccactactatcacaggaaggaaatgccagtcgtggtcatcgatgacaccacacag

SEQ ID NO: 12972 - DNA, 343 bp, Bos taurus
  Clone ID: 55-LIB34-055-Q1-E1-F12
atgcaacccagcatatggataagcgctgtagcccacatcgagtcttgtctgcattgctttctgacagccatagtgccacctacgctttcagtgagaaccactactggcgtctggacagcagccgggacgggtggcacagctggcgcattgagcatctgtggccccaaggtccctcaacagtggatgctgcctttctctgggataaaaagctctacctcatccagggtacccaggtatatatcttcctgacaagggcaggctacactctcgtacaagattatccagtgcaactggacaaggaatttgggagccctgatggggtctgccttcattctgtggatgc

SEQ ID NO: 12973 - DNA, 356 bp, Bos taurus
  Clone ID: 55-LIB34-055-Q1-E1-F4
agctccaaccagctcttcagttgatggatttaaggcaaatcttgtctttaaggagattgagaagaagcttgaagacgaaggagagcagtttgtgaagaaaatcggtggtatttttgcctttaaggtgaaggatggccctgggggtaaagaagccacctgggtggtggacgtgaagaatggcaaaggatcagtgctccctaactcagataagaaggccgactgcacaattacaatggccgactcggacttattggctttgatgactggtaaaatgaatcctcagacggccttctttcaaggcaaattgaaaatcaatggcaacatgggtctggctatgaagttacaaaatctccagc

SEQ ID NO: 12974 - DNA, 241 bp, Bos taurus
  Clone ID: 55-LIB34-056-Q1-E1-F4
ccggggccacccacacgtccgattctagatcgcgagcggccgccctttttttttttttttttttttttttttttttttttttttttttttttttttttttttaacagataaaaccaataataatgtttatttttattttgtcctgcaaaggcgccaccaccaaattgtgagggcaaccaaatcactcagaccagcgaaactagataaagcttatgggtcccatgagctcccatctccatca

SEQ ID NO: 12975 - DNA, 223 bp, Bos taurus
  Clone ID: 55-LIB34-057-Q1-E1-F12
ggctgccactcgataccgcttgacccggttgcaggttataaggaaccggcctgtgatgacccagacacagagcaagcagccttggctgccgtggactacatcaacaagcaccttcctcggggctacaagcacaccttgaaccagattgacagtgtgaaggtgtggccgaggcggcccacgggagaggtgtatgacattgaaatagataccctggaaaccaccc

SEQ ID NO: 12976 - DNA, 222 bp, Bos taurus
  Clone ID: 55-LIB34-057-Q1-E1-F4
aattattcccatcctattggccgtagcattccttacgttagtggaacgaaaagttctaggctatatacaactccgaaaaggtccaaatgtcgtaggtccatatggcctacttcaacccatcgccgatgcaatcaaacttttcattaaagaaccactacgacccgctacatcttcagcctcaatatttatcctagcacctatcatagctttaggcctagcctt

SEQ ID NO: 12977 - DNA, 227 bp, Bos taurus
  Clone ID: 55-LIB34-058-Q1-E1-F4
ataaagccccccgcaatgtcacaataccaaacccctctgttcgtatgatccgtaataattaccgccgtactactactactctcgctccctgtattagcagccggcatcacaatgctattaacagaccggaacctaaatacaaccttcttcgacccggcaggaggaggagaccctattctatatcaacacttattctgattctttggacaccccgaagtctatatttt

SEQ ID NO: 12978 - DNA, 202 bp, Bos taurus
  unsure (197): unsure at all n locations; Clone ID: 55-LIB34-059-Q1-E1-F4
gaaaaacaaaaaatcttcatccaagacgtcaactgcaatgggacggaggatgaattgattgaatgtgaccgggtggaagacgtttttgattgctcccacagcgaggatgcaggggcaatgtgtgagaagtctcctcccaaagtgcgactggtgagaggtccccatcgctgtgaagggcgggtggaagtggaacgganatggc

SEQ ID NO: 12979 - DNA, 210 bp, Bos taurus
  Clone ID: 55-LIB34-062-Q1-E1-F12
cggacgcgtgggcgccatggaagaagaaattgccgccctcgtcatcgacaatggttctggcatgtgcaaagctggctttgctggggatgacgccccccgggccgtgttcccgtccatcgttgggcgtccccgacaccagggcgtcatggtgggcatggggcagaaggacagctacgtgggcgacgaggcccagagcaagcgtggcatcct

SEQ ID NO: 12980 - DNA, 393 bp, Bos taurus
  Clone ID: 55-LIB34-063-Q1-E1-F4
cacgcttccggacggaggctctggatccactgcccacaccccgctctcgcaggcagacatgaggacagagagaacttccttcctcctggctctggggctcctggtgtctgggttctgctccagggtccactgcctcccagagaatgtgaccccagaagaacagcacaaagggacgtctgtggatggccactcattagcctccagcaacactgacttcgccttcagcctctacaagcagttggctttgaaggaccccaataagaatgtcatcttctcccctctgagcatctccatagccttggccttcctgtccctgggggctcatgaccacactgtgacagagatcctggaaggtctcaagttcaacctcacagagacccccgagacagaaat

SEQ ID NO: 12981 - DNA, 422 bp, Bos taurus
  Clone ID: 55-LIB34-064-Q1-E1-F4
aatattggggtaatccttctgctcacagtaatagccacagcatttataggatacgtcctaccatgaggacaaatatcattctgaggagcatcagtcatcaccaacctcttagcagcaatcccatacatcggcacagatttagtcgaatgaatctgaggcggattctcagtagacaaagcatcccttacgcgagtcttcgctttccatttgatccttccatttatcatcatatcaattgccatagtccacctacgattcctccacgaaacaggctccatcaacccaacaggaatttcctcagacgtatacacaatcccattccacccctactataccattaaggacatcttaggggccctcttactagttctagctctaatactactagtactattctcacccgacctcatcggagacacaga

SEQ ID NO: 12982 - DNA, 214 bp, Bos taurus
  Clone ID: 55-LIB34-065-Q1-E1-F4
attccccagcccaaagaggaacttccccatctcctccctcctgcaggcaggagtctcagggtactgacccttcttccctgtgcccccagtaccccaattcctgtctccagagaattaagacccagctcagggctacatggggtgagcctcatgcagagtgtgccttgctgatgccaaccttggaagaagaatttgctgttactttgaagactac

SEQ ID NO: 12983 - DNA, 200 bp, Bos taurus
  Clone ID: 55-LIB34-066-Q1-E1-F12
ggaggaagaagatgtgattgaagtttatcaggaacaaacagggggtcattcaacggtttagatattctttttatttttttttctttccccttaatccttttttatttttaaaaatagttcttttgtaatgtggtgttcaaaacataattgaaactggcaccccatctctttaaaacatctggtaatttgaattctagtgc

SEQ ID NO: 12984 - DNA, 285 bp, Bos taurus
  Clone ID: 55-LIB34-066-Q1-E1-F4
ccggctcgacccacgcgaccgctggaggacgatggatgacatgggacgagagattcccagtgatgccccgtggaaggcaccccttgcagaacagtgggacctgatgacaatgaaggagttgctggacaagatctgctggacagaatcttcaaagcagcttgctattctctttgtgaacctttgcgtcactgcagagatccatgaggtctccgctctctggttcctgtggtatgtgaagcagtgtgggggcacgaccaggatcttctcaacatccaatggagggca

SEQ ID NO: 12985 - DNA, 214 bp, Bos taurus
  Clone ID: 55-LIB34-068-Q1-E1-F4
agtcgttcgggagtcagagctgtgcgacgtcacttgcgctgcactgtcacatcagctgagattatggcaagggtgtgttctaccgatattgatcaaattgtgggatttcgcaacggattaagtagtgcggatgcttccaagcttggggacggtatttggatgacatatcaccatgtcacgattgcagcccacgactatggtcgggatgacttgg

SEQ ID NO: 12986 - DNA, 218 bp, Bos taurus
  unsure (200): unsure at all n locations; Clone ID: 55-LIB34-069-Q1-E1-F4
atagccgtaacttctgtgctgtgccagccgcatccctgagacaagatggtgaaggtcggagtgaacggattcggccgcatcgggcgcctggtcaccagggctgcttttaattctggcaaagtggacatcgtcgccatcaatgaccccttcattgaccttcactacatggtctacatgttccagtatgattccacccacgngcaagttcaacggcacag

SEQ ID NO: 12987 - DNA, 249 bp, Bos taurus
  Clone ID: 55-LIB34-070-Q1-E1-F12
gcgtacggccccagaaagggtttgggggatgtgcacgatgaggctgctggcattcgcggtgttggctctatttgctgtcactcaagcagaggaaggagccaggcttttggcttccagagcactgctgaacagatatgctgtggaggggcgagacctgaccttacagtacaacatttacaatgttggctcaagtgctgcatgtagatgtggaattatctgatgattccttcctctccaagaagtactttg

SEQ ID NO: 12988 - DNA, 231 bp, Bos taurus
  Clone ID: 55-LIB34-070-Q1-E1-F4
agaagatctctcagttaagtccaaagcgaaggatgatttcttgcaacttcgaaaaatttaaaaccatgaaacatctattactgctacttttctgtgcttttatagttcaggcccaatttcctactgactatgacgagggacaagatgacagacctaaggtaggtttgggtgcccgcggtcatcggccctatgacaagaagaaggaagaggcccccagcctgagacctgtgc

SEQ ID NO: 12989 - DNA, 401 bp, Bos taurus
  Clone ID: 55-LIB34-071-Q1-E1-F4
acggacgcgtgggcgccgccatccgcgcgcgcagaagaaaatcaccatgtcttcttgtcgagtggggctccatttggctgcctgtttattaaacatttcagaagccagaaaaaagagcattgttgagaacatagcgaaagctgctcttcttgaaagaaatggacagagacatcctgaagtatcagtgctcaatgtattttctgatccagagtacaacagatcagtcattacaatagcagcttctattgatgagttaggcaattctgttctggctgcctgcttggaagccttccagtctatcgatatggaggttcaagaggggatccatccttgcctaagagcagtggacctgattcccatttaccctctctctggtgtccgagtggaagagtgtggagctg

SEQ ID NO: 12990 - DNA, 401 bp, Bos taurus
  Clone ID: 55-LIB34-072-Q1-E1-F12
aggatcaccagaagtccctggaacccagctgcccccgaggcttcttggacaccatgctgatagaaatggccaaggaaagacacagtgtggaccctatgtacaccttggaaaacatcgctgtgactgtggccgacctgctctttgcggggacagagaccaccagcaccaccctgcgatacgggctcctgattctcatgaaatacccggaggttgaagagaaacttcatgaagaaattgacagggtgattgggccaagccgaatccctgccgtcaaggacaggctggacatgccctacctggatgctgtggtacatgagattcagcgattcatcgacctccttccctccaatctgctccacgaagcaacccaggacacagtgttcagaggatatgtcatcccc

SEQ ID NO: 12991 - DNA, 404 bp, Bos taurus
  Clone ID: 55-LIB34-072-Q1-E1-F4
agtggacagaactaagagttctttgatagagtaaatataaaatcttaagatcatttgtagaaaataagctgttaccatttattaataaatcctgttgtgacatttcttaaagagaaatacgcactcctagcaagctctgtctccagacgcaaaccagccttctgcttgtcacaattccacactaaatttctatattaaattagatcaagggctttcagactttaacaaagctatggaacagttcttagatgccttaaaaattttaaaggcatcaattaatgtcttcaacaaaataaaggcagatttaattctgcttgagtgttcactttctagcttcaccatgacatggtgtagagagaacgttaaagctttgaaaaaattcttttacttactttactcctcag

SEQ ID NO: 12992 - DNA, 388 bp, Bos taurus
  Clone ID: 55-LIB34-075-Q1-E1-F12
gtcgtattaaggcgggacatccctgtggttgtcaccccatacatcggcaacagcgtcatccagcttctcacgggcctgctgttcttacagaatgtctacatgctggtcatcgccagctccatgtacatattgcgcgcgcacattcacgtgaacgagaacatcgtcatgtccacgatcaatcggagctggttcatcgtcaccgtcagctccgactgcacatcgctgcagaggatcactgtcaaccttctcatgagcataatgatgttcaggaccatgctgtcgaccccggaggtcatcgtcaccatcactcacatgcggacacgtgtctgtgagatgatcaccggtaattatgcgatgacacacactgatgagaattttctctatcaca

SEQ ID NO: 12993 - DNA, 449 bp, Bos taurus
  Clone ID: 55-LIB34-077-Q1-E1-F12
gtcgtattagcgaaggccagagatgtgtttaaaagtttacaggaaaaccgtccattttcagttgattttttcaggaagatgatccagtttgagaaggagcaagaatcctgtaagatggagaacttaagagagtattatgaaagggctttgagagaatttggaactaatgattctgatctctggatggattacatcaaagaagaattgaaccacccgcttggtagacctgagaactgcggacagatctattggcgagccatgaaaatgttgcagggagagtcagtagagcagtttatggctaaacatgctttgtatcaagccggccgtttgtgaaaagaggaagagcacagtcacctttgtgaaatagtgctataagccctccgggcagatttgttttatgcgggcagatttgttttatgcaatcatctacagtttgctgagaatgtgtc

SEQ ID NO: 12994 - DNA, 432 bp, Bos taurus
  unsure (19): unsure at all n locations; Clone ID: 55-LIB34-078-Q1-E1-F4
tatagaaagtcgaattaanctattgcaatgagaagcttcaacaattttttaatgaaaggattctgaaggaggaacaagaactctatcaaaaggaaggtttaagtgtgaatgaagtgcattatgtggagaatcaggactgtatagatttaattgaagcaaaattaatgggaatattagatattttggatgaagaaaatcgccttccccagccaagtgatcaacacttcacatctgcagttcaccagaagcacaaagaccatttccgactctctattcctagaaagtctaagctggcagttcacaggaacatccgagatgacgaaggcttcatcgtccggcattttgccggggcagtgtgctatgaaacaacgcagtttgtggaaaaaaataatgacgccttacatatgtctcttgagtccttaatatgtgaat

SEQ ID NO: 12995 - DNA, 403 bp, Bos taurus
  Clone ID: 55-LIB34-080-Q1-E1-F12
agcccaagtcaatctacacaattgcatttccagcatttgtataaggtacctaattaacagtgatccaaaaataggaattggatttgtgcaaacatggagaaattgacttccataaaatttaagtcaaagaaattttgacccaaaccatatttttattcagctgagaggtggttgcagcgtttggttagcatgtctttctttttctttttccagtattctacttgcgttaatgagaacagaaacgtaaactataacctaggggtttctgttggatggttggcaactaagaatggaggaagaacaacaaagacatgttctccactttcttatttctcaaaacaatgttatcttcgtctttttaatcttaagtttttaacagattaaacctttaaagcaagaagtg

SEQ ID NO: 12996 - DNA, 220 bp, Bos taurus
  Clone ID: 55-LIB34-080-Q1-E1-F4
agattataaccagctcaatctgcctccgtcaaacggacctaaaatcactcatcgcatactcctctgtaagccacatagcactcgttatcgtagccatccttatccagacaccttgaagctacataggagcaaccgcccttatgattgcccacggcctcacatcctccatacttttctgtctagcaaactcaaactacgaacgaatccacagccgaaccat

SEQ ID NO: 12997 - DNA, 372 bp, Bos taurus
  Clone ID: 55-LIB34-081-Q1-E1-F12
tagccgtctaggaattcacgggccaaccaacgcttcagactagttctaaatcgcaagcggccgccctttttttttttttttgtttattgagagagacatagaggttatgatgttggcttgaaaccaatagtagggggttcgattccttcctttcttattttaggttaacataggtgggttcttcaaatgtgtgatatggtggagggcatccgtttaatcattctagatttgtcgtggttaagtctacagtcaagacttctcgtttagatgcaaatgcttctcagatgatgaaaactattagtataactgctgttagggaaatgaatgagcctattgatgagatagtatttcatattgtgtatgcatctgggt

SEQ ID NO: 12998 - DNA, 450 bp, Bos taurus
  Clone ID: 55-LIB34-084-Q1-E1-F12
tccgggtaacccacgcgtccgactagatcgcgaacggccacccttttttttttttttttttttttccagtgaaaaagtggaaaaaggactttaatagacattttttcagaaaacatacacaagggactgctaagcactaagcacatgctcaccatctcagggaaatcaaagccgcagcaagacattaactcaaatcaagaaggctgtattaataataataataatagaaaatcaacagcacatgtttcaagaatatggagaaattgggccccttgtacattgctgatgaagaagtcaaatggtgcagttgctctggaaataagtttgccggttcttcaaagaggtaaatgtcgaatgaccttgcatgcatgctgttaagttgcttcaccgtgtccgactctttgcaaccccgcggaccgcaacccaacagtctccctccgtccatgggct

SEQ ID NO: 12999 - DNA, 401 bp, Bos taurus
  Clone ID: 55-LIB34-084-Q1-E1-F4
cgtccgaggacacgtggggtttcatgcatttggtttaagatttaattcaagcaagagttaacaatgaagactgtgaaaggtttctgcatccttttcatgctgcatctatgtctccttgactccgggaggatgggcaaagttcttgtatggcctgtggattttagtcactggattaatttacaatttattctagaagagcttcacattcatgggcatgagataactgtcctggtaccttcacaaaatcttctgattgatcataccaaggttccctatcatgtggagatcctccagctttcagtaactgaagaaactttcatggaagagttcaatagcatgctctatgaagaaatttttgaactgccaaaactctcatggtgggaaatggcacataaactggc

SEQ ID NO: 13000 - DNA, 267 bp, Bos taurus
  Clone ID: 55-LIB34-085-Q1-E1-F4
attccctagccgacccaggcgtcaaggaaccgcaacactgctttcattcgacaagtctgttactgcaaccctcccgctgaagtccaacgctcggactgttaggtcacacaccatgtaattgtcaccatctatgggaaatgcgattgctgctcaaactggaccccctttcctaggggagagtatacactacaaatgcagtgcaccaggacatgtcttcgaaaatatgggcaactcctgctcgtgtcctgcttcataaagacttaactg

SEQ ID NO: 13001 - DNA, 441 bp, Bos taurus
  Clone ID: 55-LIB34-086-Q1-E1-F4
tggaaacgcacacacacccgcgggaagagccttgcaagggaccctttggcctctgacctgatcgtccaaagagaaagggaacctcggcatccgtgccccccagcccagctctgcagagatgcctcctcagctctcagacggcctcaactactcagccaaaatcgtccggggctccctggacagcctgccccaggccgtgagggagttcgtggagagcagcgccaagctgtgccggcctgaccaagtccacatctgcgatggctccgaggaggagaaccggcagctgctgagccacatggaggaggagggtgtgatcaagaggctgaagaagtatgacaactgctggttggctctcactgaccccaaggatgtggccagaattgaaagcaagacggtcatcatcactcgagagcaaagagatacggtgcccatccccaaaaa

SEQ ID NO: 13002 - DNA, 344 bp, Bos taurus
  Clone ID: 56-BOVMS1-001-Q1-E1-F8
agatgtttcaaattgttgcagattctaaaccaagacttaatcctcaaatgtgtttattttacttgtcctaaaataatctgtccacaaatataaaattataagtgataagttgttgttttcccactgggaatttctaatgtgaaaatgtattccatgaaggtaattttttaaaaaaataaaatgctgcataataaaaatttattctactcttttaaaaaaataaaaaaaaaaaaaaaaaaaaaaaaaaaaaaaaaaaaaaaaaaaaaaaatcaaaaaaaaaagaataaaagcacaaaaatcaaaaacaacaaaatgcaatgtaaaattaaaactaaaaaaataag

SEQ ID NO: 13003 - DNA, 392 bp, Bos taurus
  Clone ID: 56-BOVMS1-002-Q1-E1-F8
acgcgagcggccgcccttttttttttttttttttttttttttttttttttttttttttttttttttttttttttttttttttttttttttttttttgaggtgcaaaaaccttgctttattttgttgtaacaaccccaaggaggtccaacaattaaaactaacaattgaatttaaacttgcatgaaaagaactacatcaaattgaaattttgggcaattagtaatattttgttgtttttaaatttaacgacagctttattttgtccctaaatttttgctgtggcccattgcttaattgccccaatttctggtttaaatttagaactaccacacgaaggctttggctgcacccctgaacctccaagagttgacactgccctggcaaaggaatgc

SEQ ID NO: 13004 - DNA, 433 bp, Bos taurus
  Clone ID: 56-BOVMS1-003-Q1-E1-F8
gaaaaagagaggaacatgatgatcgcacagcatgagctcctggatgccagtgagcgtgtccagctcctgcacacccagaacaccagcctgatcaacaccaagaagaagctggagacagacatcactcagatctagggagagatggcggacattatccaggaagctcgcagcgcagaagagagcgccaggagcgccatcactgatgcagccatgatggctgaggagctaaagaaggagcaagacaccagtgcccacctggagcggctgaagaagaatctgtagcagacggtgaacgacctggagcaccgcctgcacgaagctgaacagctggtcctgaatggcgggaagaaccaaatccagaatctggaggccagcgtacgtgaactgcaatgagaagttgagagtgcacagaatcgcaatgttgaagctgtca

SEQ ID NO: 13005 - DNA, 358 bp, Bos taurus
  unsure (307): unsure at all n locations; Clone ID: 56-BOVMS1-004-Q1-E1-F12
atgcgacgtcatagctcttctatagtgtcacctaaattcaattcactggccgtcgttttacaacgtcgtgactgggaaaaccctggcgttacccaacttaatcgccttgcagcacatccccctttcgccagctggcgtaatagcgaagaggcccgcaccgatcgcccttcccaacagttgcgcagcctgaatggcgaatgggacgcgccctgtagcggcgcattaagcgcggcgggtgtggtggttacgcgcagcgtgaccgctacacttgccagcgccctagcgcccgctcctttcgctttcttcncttcctttctcgccacgttcgccggctttccccgtcaagctctaaatcggg

SEQ ID NO: 13006 - DNA, 427 bp, Bos taurus
  Clone ID: 56-BOVMS1-005-Q1-E1-F8
aataactagcataatacctattatcctactagtcttcgcagcctgtgaagcagccctaggtctatctctactagtaatagtatcaaatacatatggtactgattatgtacaaaacctcaacttactccaatgctaaaatacattattccaacaatcatacttatacccctaacctggttatcaaaaaataatataatttgggttaactccacagcacacagccttctaattagctttacaagcctcctcctcataaaccagtttggcgacaacagccttaatttttcactactatttttctccgactccctatccactccactactaattttaaccatatggctcctccctctaatactaatagctagccaacatcatctatcataagaaaacctaacccgaaaaaaactatttattactatgctga

SEQ ID NO: 13007 - DNA, 417 bp, Bos taurus
  Clone ID: 56-BOVMS1-006-Q1-E1-F12
aaacaactagtactattcgcacccgacctcctcggagacccagataactacaccccagccaatccactcaacacaccccctcacatcaaacccgagtgatacttcttatttgcatacgcaatcttacgatcaatccccaacaaactaggaggagtactagccctagccttctctatcctaattcttgctctaatccccctactacacacctccaaacaacgaagcataatattccgaccactcagccaatgcctattctgagccctagtagcagacctactgacactcacatgaattggaggacaaccagtcgaacacccatatatcaccatcggacaactagcatctgtcctaaactttctcctcaacctagtggtaataccaacgggcgggaaaatccaaaacaaattactaaaa

SEQ ID NO: 13008 - DNA, 438 bp, Bos taurus
  Clone ID: 56-BOVMS1-007-Q1-E1-F8
aacaaaaagaacttactgaaatgcatggtttaaataacttcctcatcaaaaccttccttctgttttttgtgctttcaaataactaatccgaatttccaaaaaattaacatttgaatttagctgtaattctcaactgacctttttccctgtactaacgtttggtttccctgtgtggcgtgttttctgagcgttcctactttcaagcatggaacgtgcaggtgatttggaaagtgtaggcagatctgagaaaacgagcctgttacagaagaacgtcatcacagcgaatacttttggaagcttaacaaaactaacccagctgtccttttatctttttttttaattaataattcctttgttttaattaatagcagcatagtttatgggtttggagacttgcatgagagtattttagcccccttatacgttcctacagttttg

SEQ ID NO: 13009 - DNA, 166 bp, Bos taurus
  Clone ID: 56-BOVMS1-008-Q1-E1-F12
acgcgtccgaatataaaaaaaaaaaaaaaaaaaaaaaaaaaaaaaaaaaaaaaaaaaaaaaaaaaaaaaagaaataaaaaaaaaatgaaataattatatatattaaaatgatataataaataataatttatggggaatattttaataaatttaatttaatggtaaa

SEQ ID NO: 13010 - DNA, 222 bp, Bos taurus
  Clone ID: 56-BOVMS1-008-Q1-E1-F8
atgcgacgtcatagctcttctatagtgtcacctaaattcaattcactggccgtcgttttacaacgtcttgactgggaaaaccctggcgttacccaacttaatcgccttgcagcagatccccctttcgccagctggcgtaatagcgaagaggcccgcaccgatcgcccttcccaacagttgcgcagcctgaatggcgaatgggacgcgccctgtagcggcgca

SEQ ID NO: 13011 - DNA, 353 bp, Bos taurus
  Clone ID: 56-BOVMS1-009-Q1-E1-F8
aaaaagtataacaaatataaatggaggaaaaggaaattaacacctttaaaaaaaattaaattataaatggggctgtgccgccctaaaggatctattcttacttactcttccatgcgacgtcataactcttctatgatgtcacttaatttcagttccatggccgtctttttacaacgtcatgactgggaaaaccctggggttacccaacttaatcgccttgcaacagatccccctttcacaagctggcgtaatatgtaacaggcctgcaccgttagcccttcccaacatttgcccaaccttaatggcgaatgggacaccccttgtagcggcgcattaggcacaaccgttgtgtt

SEQ ID NO: 13012 - DNA, 313 bp, Bos taurus
  Clone ID: 56-BOVMS1-010-Q1-E1-F12
atgcaacttcaaagctcttcaaaagtgtcacctaaattcaattcactggccgtcgttttaaaacatcgtgactgggaaaaccctggcgttacccaacttaatccccttgcagcaaatccccctttcgcaaactggcgtaataccgaaaaggcccgcaccgatcgcccttccaaaaatttgcccaccctaaatggcaaatgggaccccccctgtaacggcccattaaccccggcgggtgtggtggttacccgcacctttaccgctaaacttgcaaacgccctaacgcccgctcctttcgctttcttcccttcct

SEQ ID NO: 13013 - DNA, 321 bp, Bos taurus
  unsure (297): unsure at all n locations; Clone ID: 56-BOVMS1-010-Q1-E1-F8
gttatagatcgcgagcggccgccctttttttttttttttttttttttttttttttttttttttttttttctgtcttcattttagtaatttgttttcgattgtgccggccgttggtattagcactaggatgaggagaaagtataggagagatgctagttgtccgatggtgatatatgggtgttcgactggttgtcctccaattcatgtgagtgtcagtaggtctgctactagggctcagaataggcattggctgagtggtcggaatattatgcttcgttgtttggaggtgtgtaatanggggattagagcaagaattaggat

SEQ ID NO: 13014 - DNA, 453 bp, Bos taurus
  Clone ID: 56-BOVMS1-012-Q1-E1-F6
gtttcggaacaacacatttttgtaatgcttgtcatgatgattttcagagaatgactagcattcctaaggaagaacttccacactgtcctgcaggtcccaaaggcaaacagttagaaggaaccgaatgtcctctccatgttgttcatcctcccactggagaagagtttgctctgggttgtggagtgtgcagaaatgctcacactttttagaacactcagattcctttgtctacagagagagaagttgccttcatctcccaagcggatgtggtgaagtttaaactctgctcaagataaggacgggaccatttttacatccataaaaatgaaccattcacagtgcaagacggatgccaaataccatgtacataattcctgctatggaaagtttccccattgtttcagtttatcttctttttgaaccaagacatcaaacttgtgaggtgtttgcatg

SEQ ID NO: 13015 - DNA, 235 bp, Bos taurus
  Clone ID: 56-BOVMS1-014-Q1-E1-F12
cgcatcgtggtcttggtccttctcgggctgcggtcactgtcaggactggacttcaccaattctctccaaaaggttcaggtgtacgcatgacacccagcagtagatggtgtgcgtacttaccagaactgctatgtctctgggttgcatcgacaccacagtgagatcgatatgcatgagcagtgcggagaatcgtagatcggcgcaggcacacctgtcattcaccacggcctggtca

SEQ ID NO: 13016 - DNA, 397 bp, Bos taurus
  Clone ID: 56-BOVMS1-016-Q1-E1-F8
ctggctatgactttacataatctccagcttcagcctggcaaagctaatctgtgaactccctttgcctcctttgaaactcaagatgagatatatagatagatatccatatatttcattgtcagaagttagattgaaactatagattgggaaatagcatgaggtttgtttttaaatgggtgtgatcaagtctgttttatccaattgctgggtgaatataacctgatggtttactacagcattgctgagttgctaacatctgtgcattacacagttaatatggtaatcatggtttggggtaaaagtgagttttagaagatagttataaatagcagaatacaatgagtatgtaaacagaagctctcattttgctaataatgtatatttgaagactattctg

SEQ ID NO: 13017 - DNA, 384 bp, Bos taurus
  Clone ID: 56-BOVMS1-017-Q1-E1-F12
catggccctgtaccgcacggaggagcgcggacagccccactctcccgattagcggctcattttcaagaatgtagctggtcactacatttccccctttcatgatattcctctgaaggtggactctgaagataatgtgtttaacatggttgtggatgttcctcggtggccaaatgctgacatggtcattgcgacgaaggaaacactgattcccattaatcaagatgtcgatgatggtaagcttcgctaagtggcatgatatctttcctcacaacggttatatatggaattatggtgcccactctcagaggtgggaagatctccatcggacagagatgagcacagactgctgtggcgataatgatcgtattgatgtatgtgaaatat

SEQ ID NO: 13018 - DNA, 380 bp, Bos taurus
  Clone ID: 56-BOVMS1-018-Q1-E1-F12
gccaacatcatctatcaaaagaaaacctaacccgaaaaaaactatttattactatgctgatctcactacaactattcctaattataacctttaccgccatggaactaatcttattttatattctatttgaagcaacactagtcccaacactcattattattacccgatgaggaaaccaaacagaacgcctaaacgccggactctatttcctattctatacactagctggctccctacccctattagtcgcactaatttatatccaaaacacagtaggatccctaaatttcctaatattacagtactgagtacaacctgttcataactcttgatctaatgtcttcatatgactagcatgtataatagctttcatagtaaaa

SEQ ID NO: 13019 - DNA, 135 bp, Bos taurus
  Clone ID: 56-BOVMS1-019-Q1-E1-F8
gttttaaggaaaacttggggttgcaaataacaaaggtgatgcataaagaagtgggttagatcagtttctttcactcaattaacgctttacccaagcaaggtttaatgctctgaaataaagaatccaccacctccc

SEQ ID NO: 13020 - DNA, 378 bp, Bos taurus
  unsure (370): unsure at all n locations; Clone ID: 56-BOVMS1-020-Q1-E1-F12
atgcgacgtcatagctcttctatagtgtcacctaaattcaattcactggccgtcgttttacaacgtcgtgactgggaaaaccctggcgttacccaacttaatcgccttgcagcacatccccctttcgccagctggcgtaatagcgaagaggcccgcaccgatcgcccttcccaacagttgcgcagcctgaatggcgaatgggacgcgccctgtagcggcgcattaagcgcggcgggtgtggtggttacgcgcagcgtgaccgctacacttgccagcgccctagcgcccgctcctttcgctttcttcccttcctttctcgccacgttcgccggctttccccgtcaagctctaaatcgggggctccctttanggttccga

SEQ ID NO: 13021 - DNA, 443 bp, Bos taurus
  Clone ID: 56-BOVMS1-021-Q1-E1-F8
ctgtgagccagctcctgcattgtctaagggaaggaaaccagaaggtggagagacttgaagttgccctcaaggaagccaaagaaagaatttctgattttgaaaagaaagccaaggatcattctgagactgagacccagacagaggagcacacagaacaagagaaagaagaggagaaagacaccaaaactattggaagtgaagtggaaacactgaaccttcaggtgacaaccctgtttaaggagcttcaggaagctcacacgaaactcagtgaagctgagctaatgaagaagagacttcaagaaaaatgtcaggcccttgaaaggaaaaattctgcaagcccatcagaactgaatgaaaaacaagagctggtttataaaaacaaaaagttagagctccaagtggaaagcatgcgatcagaaatcaaaatggaacaagctaaaaca

SEQ ID NO: 13022 - DNA, 440 bp, Bos taurus
  Clone ID: 56-BOVMS1-022-Q1-E1-F12
ggatacaagacaagtgttttggggatatatatttatacccaattgtctaaaactatgtgaggggaacctaaaagtgcacctgccttctcctgggggaaaaaaaaataacacagcaaaaggaaaacatatgattagtgtctatgaagaactttgtatttagcataggatgagctctggatacatatataaaggaaagccaggctcacttcagaattgaggaatgggagaatgagcaactccaattttacatatccaccaatacaaccagttatcattaagtcttatcgttttagttctctgttaaatatcctaaaactacatcaccatggaatggacatcattattatactttgatctgtcaaaagttaagaactgtgacagacagccctcagtaagattttgatcttgctagatcactgaaaggactgcagctgtatata

SEQ ID NO: 13023 - DNA, 414 bp, Bos taurus
  Clone ID: 56-BOVMS1-022-Q1-E1-F8
gttggatgcctttccaaaggttcctgagagctatgtggagacttcagccagtgggggtacagtttctctaatagcatttaccactatggctttattaactataatggaattttcagtatatcaagatacatggatgaagtatgaatatgaagtagacaaggatttttctagcaaattgaggatcaatatagatattactgttgccatgaagtgtcagtatgttggagcagatgtattggatttagcagaaacaatggttgcatctgcagatggtctagtttatgaaccagcaatatttgatcctttcacacagcaaagagagtggcagaggatgctaaagctatttcagagtagactgcaagaagaacattcacttcaagatgtggtatttaaaagtgtttttaaaagtgcatc

SEQ ID NO: 13024 - DNA, 430 bp, Bos taurus
  Clone ID: 56-BOVMS1-023-Q1-E1-F12
tagccgcgctagcagtgtccgggctgtcccagcaggtgcgatgcttcagtacatctgtggtcaggccatttgccaagcttgtgaggccacctgttcagatatatggcatcgaaggccgctacgccacagctctgtattccgctgcatctaaacagaataaactggagcaagtagagaaggagttgttgcgagtaggacaaatcttgaaggaacccaaaatggctgcttctcttttgaatccctatgtaaagcgttcagttaaagtgaaaagcctaagtgacatgacggcaaaggagaagttctctcctctcacgtccaacctgatcaatttgcttgctgaaaatggtcgcttgactaatacccctgcggtgatttccgcattttctaccatgatgagtgtccaccgtggagaagtaccatgcacagttac

SEQ ID NO: 13025 - DNA, 450 bp, Bos taurus
  Clone ID: 56-BOVMS1-023-Q1-E1-F8
cacgcaaccgcacagaagtcaatttcctttaaacttcttgtgacccacgttcaagatttccagcatcttcggtatttcacattgaaggagccaccatgtgtagcagaattatctttactttcagcaaatgtttcttaacattttgttgtttaattctgtttctttgtaccctctagcttcttttatccccccctccaaaaaaaacattagcttcattattttttaaaaaaaacttttgtattagagtatagctaattaacaaacaatgttgtgatagtttcaggcggacagcaatgagactcaactatatacatatacatgtatccattctccccaaactccccttccatccaggctgccacatgaaattgagcagagttccctgtgctgtccagcaggtccctgctggttctccatgttaaatacagcagtgtgttcatgtccacccca

SEQ ID NO: 13026 - DNA, 426 bp, Bos taurus
  Clone ID: 56-LIB188-001-Q1-E1-F8
acaataaagaaatctaaaacaataaaaaactaacaggtaatgcttagctccacattttggacacctgattgaatttacctctaaaaatgtagataaaaaattatatactccttgtttgtgatacttaatttccaaagcaccaaggcaaaataaagagaggcccacctctcatttaagtatgaattgccaatggcaaacatctgcacaatatcatataaaaagtcaagcaaataaaattacataataagcaaatgcaaatcacagtgctttaaaatatataatcattggtaatcttcagagaaggcattgcttcattaacattctggtcaagacgatgatattccactgttttggaacaaaaaccatcacgccatttcctgctttgaaccagaaggaaaatcttccttttgttgtgatatgtaatat

SEQ ID NO: 13027 - DNA, 318 bp, Bos taurus
  Clone ID: 56-LIB188-002-Q1-E1-F12
accattacagatattaaaaaaaaaaaatttaacaagcaaggctagagtttgataaattccatcttgtgatccattcttgtgcattcttcacttcttgagtcactcccaaaatccatttgtattgtaactcctaaaggatgatttacaggtcagtatcaaaccaggccagctgattgctgtcgcccgggggcagcccatccatgaggtcctgggcatgccccagatctggcagcccgtcaactggatagtcagcaccagggtggtggccgcccatctcatgttccatcatggggtccatccccaaggcgtcctggccgt

SEQ ID NO: 13028 - DNA, 356 bp, Bos taurus
  Clone ID: 56-LIB188-002-Q1-E1-F8
acgctgcagtcgttctgtgccaatgggcccagggggcagaggctgctcccggggcagctcctttctgtccccatcatggggggcaggtggccgtctcctaggaggttcagagggttcagagccaggtggaccctcaccaggaacagcattcaggggtgaggggcctccaggtcgcttggggggcccctctgctgaccccttgagtcctccatcaggggaacttcgctggctgcagggacctgatgacacctgagaatccccactcaggtccaccccactgtcagattgactcatctacctgcccgggcggccgctcgaacaatgaaaggccattttctttcacaaaaagtcactgc

SEQ ID NO: 13029 - DNA, 430 bp, Bos taurus
  Clone ID: 56-LIB188-003-Q1-E1-F8
cgggatacatggatatagctatttatttctatctactagaaaataaagtcatattttttcttaatttaatattggtcattgctaatcagaacacactattgccaggaacacagtagttattgttaaaatcagctgcactagatacaatttgaaaatatccagcaccaggttaattccaataacgaacccaatagattagttaatgctatgagaagactaaagagaaagagaaaagagacgcagacccaggcctggctccacatgctactaactaccagctctcagatgtgtcactgggaacaatacacactccatgcgttttgctacatctccagaagaggtaaggacttgagtccacacggggatgctcgcttgcaagtccttgaggcccacagcctggtgtgtttcacgcacagataaggtcctccct

SEQ ID NO: 13030 - DNA, 402 bp, Bos taurus
  Clone ID: 56-LIB188-004-Q1-E1-F12
acacgtctccgttatgcgtgagtgcatctccatcgacgttggccattctggtgtccacatcggcaatgcctgctgggagctctactgcctggaacacggcattcagcccgatggtcaaatgccaagtgacaagactattgggggaggacacgactccttcaacaccttcttcaatgacacatgggctggtaagcatgtgcccattgcagtgtttgtacacctggaacccacagtcattgatgaagtgcgcactgggacctatcgccagctcttccaccctgagcaacttatctcaagcatagaagatgctgccaataactatgcccggggtcactacaccattggcaaggagatcattgacctcgtcttggtccgacttcagaaactggctgaccaatgcac

SEQ ID NO: 13031 - DNA, 421 bp, Bos taurus
  Clone ID: 56-LIB188-004-Q1-E1-F8
actgctggccgggtgggctacgttgcaggtgaaggtctgtcctgagctgctgccgggcacggtcaccatgctgctgagagagtagagcccggaggactgaaggacagccgggaaggtgtgcacgccgctcttcagggcacccgagttccaggtcacggtcaccggctcgggcatgtagctggacaccaggcagcccagggtcacggtggagctggatgtgtctccgcagctggatgccagagggtagactttcggggctgtggtggaggccgaggatacggtgacaacgactcctgtgccccagccatgtaaatgatatccaacattaatgcatttacgaaaatcgatgtcggcctcgccgccactacatttcccacagtaatatgtggccgaatcctcaggtgttacgctgctcactgag

SEQ ID NO: 13032 - DNA, 362 bp, Bos taurus
  Clone ID: 56-LIB188-005-Q1-E1-F8
acccatatgatgcactcacgtcattctgaaggagctttgcggaaatgtcttttttgttctgtgtggatttaatgagagaaatttgaatatgtctagagtggctgtgtatgcaacacacaatcctgccggaacttctgtgcaaaacatgatacactggctccaggttgttaaattgcacaagtttcaagcctttgactggggaagcagtgccaagaattattttcattacaaccagagttcccctcccctttacaacgtgaaagacatgctggtgccgactgccatctggagcggaggtcgggactggctcgcggacgacaaggacatcgtcctcttacagatgcagatctccaacctggtgt

SEQ ID NO: 13033 - DNA, 421 bp, Bos taurus
  Clone ID: 56-LIB188-006-Q1-E1-F12
gcgacgggcgcgggatacaaatatattattgcatgcactgtgaccttggggggagatcggaaggtggacaaagtggacgacacccccgcacctccctgcgatctggctggcttggatctcgtttttaaaccccttcctaccccgcctgccctctggatatggcctgtgtgctgctctcttggccccagtgcaccatctgccccgtgacgttctcccaccgagcccctcttaccctacgcgtgtctgctccccttgttctgtagcgtttgtacgagcatcatgggttaccagatgagggattccttttgttcccacaaatatctttcttactttgcacaatttatacttggcctcctcaggtgtaatacgatgaacagcaaagcgacccttggtgtcatagatcaaacgaaagttctctcca

SEQ ID NO: 13034 - DNA, 387 bp, Bos taurus
  Clone ID: 56-LIB188-006-Q1-E1-F8
gggatactaacccaatccccgcctctgcatcaccagggagcgagaccttaacgggtttgtagatttcctacaatggaaagcagagttcctagttagatccctgcacaagcaggcgctttctggatctggagtgggacagatctgagaagagaccgtggggcagccctttggagaaagccctgttgttctcccaggtcccctgcatctgtcgcgcgtcacagcatggctcaccctctccagtcctgtcctcgctgtgatccttcgaagttttctttttgtgcacctcggttaatcatgtgaatgagatggaagcactgtacacccggcagatactggcaggcatgtcctacctgcacagcaacatgattgttcaccgggacatcaagg

SEQ ID NO: 13035 - DNA, 393 bp, Bos taurus
  Clone ID: 56-LIB188-007-Q1-E1-F8
gccctgggcccgggatacaggtcgaagctgggcagctgctcctctttctgaccgatacagaacttgcccaggtccaggttccggacgggaaactccaccaggtcgttgatcttgtcacgccagatgaagctgcggaaggagaagcgcttgagctgcacgatgagcacgttgggcaggcgccacagcagcagctgcttggaggcctcgcggtgctgtttgcactgcgggcagtacgctcaggtcctctgagggggagcctgcctttgtgattaggtcagcctgaaaagcatttggctcttgttgaccttactgttcattttccttccttctcccgaggtgtctgagcgtttgagtcaaccaggagtggcgatcggtttggcttggactccctta

SEQ ID NO: 13036 - DNA, 438 bp, Bos taurus
  unsure (426): unsure at all n locations; Clone ID: 56-LIB188-008-Q1-E1-F8
gccatgggcgcgggataccatctccaaacctgagtggttcaaatgccgccgatggcagtggaggatgaagaagctgggtgctccctctatcacctgtgtgaggagggcctttgccttggaatgtatccgggccatcgcggagaaaaaggcggatgctgtgaccctggatggtggcatggtgtttgaggcgggccgggacccctacaaactgcggccagtagcagcagagatctatgggacgaaagagtctccccaaacccactattatgctgtggccgtcgtgaagaagggcagcaactttcagctggaccagctgcaaggccggaagtcctgccatacgggccttggcaagtccgctgggtggatcatccctatgggaatccttcgcccgtacagcgccgaatctaccttcgaggggattctcanaaacccaagagc

SEQ ID NO: 13037 - DNA, 371 bp, Bos taurus
  Clone ID: 56-LIB188-009-Q1-E1-F8
acaagcttttttttttttttttttttttttttttagggatgttttaaagtggtaaactttattttaaaactatgtgctggagtaagcatgaaatttctgaaaactgattcctttgaaatcccccttcagatccaagtgtccaggtcctttcttgccaggtgacctgcaagactgaggtcacaccgtcaccgcctcgggccgacgcctgcagagcaggtacttgttctcttctggtaggttctgtcttggccaggggcagattgatccgtgggccccggggagagtctttgtgtctgatcagtctacaaggtagactcactctctctcctggtgggaaaaggcaccatgcgaagccacaaggcaactggtgc

SEQ ID NO: 13038 - DNA, 424 bp, Bos taurus
  Clone ID: 56-LIB188-010-Q1-E1-F8
accaaaaccttccctatggccccaccaacataagcccccagggctgggtctgtgcccacaaagggttggcctgttttgactgaactaacctgtggatttagtccaacaaatgcatttgcctgatttcagggctgaatttctgcttgacccaagtgtcaggcagagctgggtggcctcagctgactggcggtggacaggctgcaggatgggccgaaagtgcattactagagatgaccgcggttgaggacacctatttcccaggacccatggctatgtgaccacactggccgtgagtgactggttgttgaggatgactactctttagcaaacctattgtgtgtctgtagaggctgtttgatgattaaaacaatggctacttcctgttttggaaaatgcttgactgcattttcatttgaatgaacaa

SEQ ID NO: 13039 - DNA, 337 bp, Bos taurus
  Clone ID: 56-LIB188-011-Q1-E1-F8
actttgtaatttttcagtctgagaagctgttccagataacccaggtaacgctcagagggcacatcttccttttgaatgtgcttctcaacactattgggaacaatttcctcacttgacgaaatgctttcagcttccatttgcttaatatcttccatggcttgatcctcagttgattcactcccaatatccttgctcagttcattgaccttctcctttccaaacacttctggaaaaggtgccacaaaaaacctgagtaaattttcattgaggacttcttgagggagtccttggtgcttgataggatgtttacgcctggcaagagcaacagccacatgac

SEQ ID NO: 13040 - DNA, 426 bp, Bos taurus
  Clone ID: 56-LIB188-012-Q1-E1-F12
accaaaagaacttcctcctgatactgcgctgctggacctgcaaaacaacaaaataactgagatcaaagatggagactttaagaacctgaagaaccttcatacactgattctcatcaacaacaaaattagcaaaatcagccctggggcatttgctcctttggtgaaattggaacgactttatctttccaagaatcaactgaaggaattgccagagaaaatgcccaaaactcttcaggagctgcgtgtccatgagaacgagatcaccaaagtgcgaaagtctgtgttcaatggattgaaccagatgatcgtcgtagaacttggcaccaacccgctgaagagctcaggcattgaaaatggagcctttcagggaatgaagaagctctcctacatccgcattgctgacacaaatataactaccatccctca

SEQ ID NO: 13041 - DNA, 419 bp, Bos taurus
  Clone ID: 56-LIB188-012-Q1-E1-F8
acaagcttattttttttttttttttttttttttttcaacagcatttctaatttaatttcttgctaaaatgacagcagggaattgtaaatactgatgatcttggcaaaaatccgacttcaggaagtggagaggaaggtccctcgcgcctggagattggggctgatatcagggaggagctgaggcccagggaggcaggctatcttctttgcaggctttacctcatcaggaaggcacaggcttccataagcggggaggttgagcattttttcaggttggcaatggccgtgacatactctgtccccaaatattcttcatacgttggtcggcctccaagtttggccagacactcactgttgtcattgaacagaaggtttttggtttcagatttgaacacacaaaacttgtacgggcagtttttt

SEQ ID NO: 13042 - DNA, 407 bp, Bos taurus
  Clone ID: 56-LIB188-013-Q1-E1-F8
actgctgttttcggcagggggactactgtgatcgtcctgggtcagcccaagtccccaccctcggtcaccctgttcccgccctccacggaggagctcaacggcaacaaggccaccctggtgtgtctcatcagcgacttctacccgggtagcgtgaccgtggtctggaaggcagacggcagcaccatcacccgcaacgtggagaccacctgggcctccaaacagagcaacagcaagtacaagttcccctcggcccgtctgcccagcaaggccccaggttcaaagtgctgggaggtgggcccttcgttccgaccccagcgcacacgcagctccaagctgctgatgtccggacggtggtccccaaggccatgagccacagtattaggagagtcgggaagcccctttccttc

SEQ ID NO: 13043 - DNA, 224 bp, Bos taurus
  Clone ID: 56-LIB188-014-Q1-E1-F12
cggatacttgctcatccacacctttagctggctgtctgtcagatccccgagcatctcagccagcagccagcgatcgatgtgttgatacgtgatgcccacgacatggcagataaattttcggacagagtcttcaaagccggttataccttccaggaggtccatgttttcatccagggcttgccagaaggcttggaagtggcaggtctccagcaggtctccgaggt

SEQ ID NO: 13044 - DNA, 347 bp, Bos taurus
  Clone ID: 56-LIB188-015-Q1-E1-F8
acagaccatgaacttgttacacaatacagctgtttcttgcacctccctgctctatcagaggcaggaaagctggagggagcaggggagagcacgggaagcacccaactaagaaacgaaggaccccttggaccagaccctctgaaagcagagcctggaatttgcttttccggtccctctggccagctttctgctcagcctggggagggcaggggtggcaggggcatctcccctgcactgggctgttagatttctctctttctggaagaaaccaccttcccgtccacagactcctcaacgttgatgcggaccttgccgccatcgccacctcccagggaggcttctctggt

SEQ ID NO: 13045 - DNA, 387 bp, Bos taurus
  Clone ID: 56-LIB188-016-Q1-E1-F12
actattttgaccgtgatgatgtggctttgaagaactttgccaaatactttcttcaccaatctcatgaggagagggaacatactgagagactgatgaagctgcagaaccagcgaggcggccgaatcttccttcaggatatcaagaaaccagaccgtgatgactgggagaatgggctgactgcaatggaatgtgcgctgtgcttggagagaagtgtgaatcagtcactactggaactgcacaaactggccactgaaaaaaatgatccccatctgtgtgatttcattgagactcattacctgaatgagcaggtggaagccatcaaagaattgggtgaccacataaccaacctgcgcaagatgggggctcctggatctggcatggcagagt

SEQ ID NO: 13046 - DNA, 280 bp, Bos taurus
  Clone ID: 56-LIB188-016-Q1-E1-F8
acaccaattacgttcggcggcgggaccaaggtggaaatcaatcggtctgatgctgagccatccgtcttcctcttcaaaccatctgatgagcagctgaagaccggaactgtctctgtcgtgtgcttggtgaatgatttctaccccaaagatatcaatgtcaagtggaaagtggatggggttactcagagcagcagcaacttccaaaacagtttcacagaccaggacagcaagaaaagcacctacagcctcagcagcatcctgacactgcccagctcagagt

SEQ ID NO: 13047 - DNA, 411 bp, Bos taurus
  Clone ID: 56-LIB188-017-Q1-E1-F8
gggataccttgaccattgtcctcagtctagacagaaggtctagtccctagcatatggaagctgaggggtagcaggagacccactgagacccaatcccaacactgaaacctgccaggctcccctttactcctccccaggtccttccagcgggaggacctgcaagggcaagcccaccttggcttgattgcctggcaactgagaccctgctctggggaagggaagaggtcagaggaagccctgcagagggctggggaggtggggcccatctctgagcaatcagagtacgaggaaagaatgtatgtgcctgatggagaaagggatcggcatgctgggaggtgagggacttatctggggtgctccttcctcctccgtttgtggtcacagacaggaagtcacaggatggcgccatcc

SEQ ID NO: 13048 - DNA, 437 bp, Bos taurus
  Clone ID: 56-LIB188-018-Q1-E1-F12
actttagaaagaaatattagcttaactcttttgacatctgctattgtgacacatcccattgctggcaatgtggtgcacactccagaacttttaactactgttttgcaagccttcaggggcagcgttgtggagtcctgggcagtgctctgtttgccatcatgcctttccctgggtgttgcactagacgcagaaaggcactccatcataagtgcatgtgagcgagcaccctgctaaaggggtcataatgcttcagaagcaggagctaatataaaggaacaggtccttcttttcttaaacagttttttctgcatgaaataatgtggaggccctggactgctgctcattttttaggattgtactgtccctgtgggtcgtgtggagactggtgttctcaaacctggcatggtggtcacctttgctccagtcaatgtaacaac

SEQ ID NO: 13049 - DNA, 426 bp, Bos taurus
  unsure (407): unsure at all n locations; Clone ID: 56-LIB188-018-Q1-E1-F8
catggcggcgggatactgccctcaaggcccagcggccgacggggctccagcagctgctggagatggcccaggcccaggggaaccctcacagtgtcctccctactaccacgaggaggcaggctactaagacacccatgcgggccatctccccacatcattgccccatctgggtttttgggtcattctgtgatttttgtcctgtttttctacatgtctgaatgctgccagttgagactctgggggaaaggggtgaaggccatatccagatgcatgtggggtggcgggtccccatcatggcagctccagacatcaggtttcccagcagactttacgccaagctgttacggggaagaacacaccaggcaatgacgggaactggccccaagtggtttccggttacatcttcnctgattcacttttctctgc

SEQ ID NO: 13050 - DNA, 414 bp, Bos taurus
  Clone ID: 56-LIB188-019-Q1-E1-F8
accgggagggtgatgggagctgcttcccagacgccatcgaccccttcctgtgcacccatgtcatctacagctttgccaacataagcaacaatgagatcgacacctgggagtggaatgacgtgacgctctatgacacattgaacacactcaagaacaggaaccccaacctgaagaccctcctatctgttggaggatggaacttcggttctcaaagattttccaagatagcttccaagacccggagtcgcaggactttcatcaagtcggtgccaccatttctgcggacccatggctttgatggactggacctagcatggctctaccccgggtggagagacaagcggcatctcaccactctggtcaaggaaatgaaggctgagtttgtaagggaagcccaagcaggcacagagcagc

SEQ ID NO: 13051 - DNA, 416 bp, Bos taurus
  Clone ID: 56-LIB188-020-Q1-E1-F12
acatgttcatggctggtctcgggctgctggttgtcgttggccttcatcagctcctggaatctagaaagcgcaagaggcccattcagaaggtagagatgggaacctcgagtcaaaacgacgtcgacatgagctggattcctcaggaaactctgaaccagatcaataaagcttcaccaagaaggttgcccaggaaacgggcacagaagagatcagtgggatctgatgagtaaatgttcctttgtgcaacaattcggtctttacttaacccgccctaatgtttttcggcctgatgggaattagtgcagagaagccatatcaccatagaaggcggctactacttatgtgtggactgagcaatccgagtctgtggcgatcatattgctgaaaatgcactgcatttatttttctaaagtaac

SEQ ID NO: 13052 - DNA, 415 bp, Bos taurus
  Clone ID: 56-LIB188-020-Q1-E1-F8
gggatacatggatatagctatttatttctatctactagaaaataaagtcatattttttcttaatttaatattggtcattgctaatcagaacacactattgccaggaacacagtagttattgttaaaatcagctgcactagatacaatttgaaaatatccagcaccaggttaattccaataacgaacccaatagattagttaatgctatgagaagactaaagagaaagagaaaagagacgcagacccaggcctggctccacatgctactaactaccagctctcagatgtgtcactgggaacaatacacactccatgcgttttgctacatctccagaagaggtaaggacttgagtccacacggggatgctcgcttgcaagtccttgaggcccacagcctggtgtgtttcacgcacag

SEQ ID NO: 13053 - DNA, 334 bp, Bos taurus
  Clone ID: 56-LIB188-022-Q1-E1-F12
acaaccagatcctcagaattgaagaggaactgggtagcaaggccaagtttgccggcaggagcttcagaaacccgctcgccaagtaagctgtgggtgggcgagcccctgcagtcactcgttggctccttagacctgcatctgatgtcaccgagcagtgtgaggcccctgctgatgcccacaggggcctctggtagttacctgccctctcctcgtcctgtgacgtccccgctgcttccttagacctgctatagaagccatgcctgaccatctggagccctgctggaaaccctagctctgtaatcacgtacctgcccggacggtcgctcgaacatgt

SEQ ID NO: 13054 - DNA, 412 bp, Bos taurus
  Clone ID: 56-LIB188-022-Q1-E1-F8
acaacgtcttcaggatccactggatcatggcagccctgactttcatcaatagcgtctctctcctcttccacggtatcaactactacttcatcaagagccaaggccatcccatcgaagggctcgctgtcatgcactacatcacgcatctgctgaaatgtgccatcctcttcatcaccattgccttgatctgctccggctgggccttcgtcatgtatgtgctgtcagacaaggagatacaacatctttgggatattgataccactgcaggtccagtccaacgtggcctacattgtcatggagtctctgccatgagggtgccagcgactatcgtatctgggaggaaatcctcttcctggtggatctcaactgctgtggcaccatcctgttccccgtagtctggtccatccgggat

SEQ ID NO: 13055 - DNA, 443 bp, Bos taurus
  Clone ID: 56-LIB188-023-Q1-E1-F12
ccatggcggcgggatacagggggtatcccttgaggtcgtaagtggccccatccagacccatggtcaaatattcattccaaggttctccgagaagacagcatggctgctttccgcctctttgagacccgtatcacccaaatcctgcatttcaccaaggatgccaaggccagcgctgatcggaccagaaacttcctggtccgagcctcttgccgccttcagttggaacacctgcccgggcggccgctcgaaccatggagcttgctgcccaaggctttaacaatgcctaccaggacatggacattgacaaggtggatgaactgatggctgacatcatacaacaacatgaggtggcccagcagatctcagatgccatttctcggactgtgggctttggagatgacctggatgaggatcaactgttggaggagctagacgatctggaa

SEQ ID NO: 13056 - DNA, 412 bp, Bos taurus
  unsure (349),(378): unsure at all n locations; Clone ID: 56-LIB188-023-Q1-E1-F8
acgggctctcagccgaggtcaagaaccggctgcagtccaaatatgaccctcagaaggaggcggagctccgaagctggattgagggactcactggtctctccgttggcccagacttccagaagggtctgaaggatgggatcatattgtgcacactcatgaataagctgcagccaggctcagtccctaagatcaaccgctccatgcagaactggcaccagctagaaaacctctccaacttcatcaaggccatggtgagctacggcatgaatcctgttgacctgtttgaggccaacgacctgtttgaaagtgggaacttgactcaagtgcaagtgtcccctccttgccctgnctgggaaggccaagacaaaggggttgcanagtggtgtggacattggcgtcaaatactcagaga

SEQ ID NO: 13057 - DNA, 417 bp, Bos taurus
  Clone ID: 56-LIB188-024-Q1-E1-F8
acggccggatcatcaaggacgtggtgctgcagtggggagagatgcccacctctgtggcctacatctgctccaaccagatcatgggctggggagagaaagccattgagatccgctccgtggagacgggccacctggatggggtcttcatgcacaaacgagcccagaggctcaagttcctgtgtgagcggaacgacaaggtatttttcgcctcggtccgctccgggggcagcagccaagtttacttcatgaccttgaaccgtaactgcatcatgaactggtgacggggccctgggctgggctggcctctgtggaccagctcaccccccacagccagactccccggccgcccttctcttccctccctgggcttttgcttttactggtttgattcactggagcctgctgggaacgtgacct

SEQ ID NO: 13058 - DNA, 381 bp, Bos taurus
  Clone ID: 56-LIB188-025-Q1-E1-F8
acaacatccaggactcctgtagcactcgggcagctgactccctcatctctttggcatactgaatatccatcatgaagttgtgcacatgcttctctgccttattaaactccagcttccgggccaccacggccaccagcagggctgtgcagcagacccccatgacgccagtgcagaggcagacaatcttgccccacatggtgcctggcaccacatcaccatagccaatggtcaggaatgtgatggggatcagccacagtgtgtctgaaaggtgcccagtggcattcacggcctgcctctcggctaccgacagcacccaggcggtggtgagccagaggccaagcgtgaggcagagcagcaggcggccggggtgcgtgttcatgt

SEQ ID NO: 13059 - DNA, 364 bp, Bos taurus
  Clone ID: 56-LIB188-026-Q1-E1-F8
actgcatcacccctaacctcagtcatgtgttccaagaacttctgtccgtttatttatttggttttggtaacattgaattcgttttgactatgctgggtctttgctgctcgctggaagttgctaggacctctggactgcagtctcccatctcttgctgacctcttgttgacctctgcagaatcctggttggtgggagcttgttagttccttgttccttacccggacctcctgtggtaagtgttttctctcctctgcggcctggtaagggtgggtgggcattggcatcccaaaggtggctagaagtcaatgatttaggcaggcttgtgaatagatatgggagaaggcaatggcaccccactccagt

SEQ ID NO: 13060 - DNA, 397 bp, Bos taurus
  Clone ID: 56-LIB188-027-Q1-E1-F12
actttgcagaggccctggggccactggagagctttgaagcctggcctgatgacttgctcatcagcacctaccccaagtcgggcaccacctgggtaagcgagatcctggacctgatctaccatgagggtgacctgcagaagtgtcagagagcccctgtcttcttgcgggtgcccttccttgagttcagcgcccctggggttcccacaggtgttgagcttctgaaagatacaccagccccacgggtcctcaagacacacttgcctctggccctgcttccgaagaccctgctggatcagaaagtcaaggtgatctacatcgcccgcaacgccaatgatgtggccgtctccgagtaccacttctatcgcatggccaaggtgcaccctgaccctggcacctg

SEQ ID NO: 13061 - DNA, 168 bp, Bos taurus
  Clone ID: 56-LIB2809-001-Q1-E1-F12
acactgcaccactaaaggtcaacagacaatatttggggtgacctaggaggcttgaacaaatactttaaaggaattctctaggaccacaccccctctactttggctttttggatgaagcacaggcctttgtgctgtcctccaggcagtgtcacagtcaagagcatcagt

SEQ ID NO: 13062 - DNA, 145 bp, Bos taurus
  Clone ID: 56-LIB2809-001-Q1-E1-F8
acccccttgaagctaactcgtctctgagccctgggccctgtagtgacaatggacatgtaaggactaatctccaggggtgcatgaatggcgctctggacttttgacccttgctcgatgtccctgatggcgcttttaatgcaacagt

SEQ ID NO: 13063 - DNA, 482 bp, Bos taurus
  Clone ID: 56-LIB2809-003-Q1-E1-F8
acccaggcatcccatggtctcggcaacgctgtaagttgatagcagccaggtcaaagccgtggatcttgtgagtgggctggaaaagcttgttgcgcagctcactcgtcaccattttatcctgattcatcagtttggacttcttggccagcagaccccgcaccagagggtcaattccaccgtctttgattatcctccaggtgttgaagaagagggtgtgtagggggagctctgcttccggaccccatggctggtaattctcatccaggcgggacacagtggagggaacctccatgtggccaaagcggaaggcaaaggtgaagacattggaaattcggggatccacagagttattatagccttggtagggcgggatccacttctgcatctcactacctagcacaatgggtaggtagtccctaaaggtgatgatctgtatgaaggctcccaggattttccgggcttcctgatagagcttctctcca

SEQ ID NO: 13064 - DNA, 412 bp, Bos taurus
  Clone ID: 56-LIB2809-004-Q1-E1-F8
acagcagaaaggcctgaatgggcatatctctctggggatagggcactgctttctggggaacaggcaggactttggactgagaaagggacagcacggactgacgaggaaacatgacagttggaggaagaggctggtgaggctggtgcatccaagactggagcagaggcagaggaaggtgcagattttcaacatcagtgagagtcaggctctggctttcagtaaagggctcaactggatatttagggaagggcatttctttgtgcttaggagccatagcccccttcactttggagactcccattacttcacgctgaaggaaaggcggcaccaccacaggggtttgagtaagaggagggatgttttgtgggaggctgttatggatgggcccagggaagggatagactagagactg

SEQ ID NO: 13065 - DNA, 441 bp, Bos taurus
  Clone ID: 56-LIB2809-006-Q1-E1-F12
acagcagaaaagcctgaatgggcatatctctctggggatagggcactgctttctggggaacaggcaggactttggactgagaaagggacagcacggactgaggaggaaacatgacagttggaggaagaggctggtgaggctggtgcatccaagactggagcagaggcagaggaaggtgcagattttcaacatcagtgagagtcaggctctggctttcagtaaagggctcaactggatatttagggaagggcatttctttgtgcttaggagccatagcctccttcactttggagactcccattacttcaggctgaaggaaaggcggcaccaccacaggggtttgagtaagaggagggatgttttgtgggaggctgttagggatgggcccagggaagggatagactagagactgtgtctgggcaaaggggtggattttatcct

SEQ ID NO: 13066 - DNA, 395 bp, Bos taurus
  Clone ID: 56-LIB2809-007-Q1-E1-F8
atacattgagatcatccagctctcttgcaagggccagagccaccaggcaggcaaggatgaggaccttcatggctctcaattccttttttccaaagtagaggacaagaagtgaaggagaggaatctatcatctcccaggaaacatataagcaggaaaagaatatggccattaatcccagcaaggagaacctttgctccacattctgcaaggaagttgtaaggaacgcaaatgaagaggaatattctatcggctcatctagtgaggaatctgctgaagttgccacagaggaagttaagattactgtggacgataagcactaccataaagcactgaatgacatcaatcagtcttatcagaccttcccccagtatctctagtaccggtcgcagcgtcca

SEQ ID NO: 13067 - DNA, 419 bp, Bos taurus
  unsure (408): unsure at all n locations; Clone ID: 56-LIB2809-009-Q1-E1-F12
ggccgcgggatacatgtaagctcaccactagcaatggtattgatggtagggatttctgttttatcctgatttttctttggtggaatggccataaatgataaatgtgggtgtgggtgacgtgccatggtagttggctgggcttggcaggacttggcaggcacagtatttgacaaaacttgccattgaagaatttgggcaggtgacctaactgcagctggctttgcataatatgggtatggcagaaattgattattaattagtgcaactggtttctgttggtagtaattgagtccataactaggatacctactcagcacatactgaattgggatatatttggctattttgtcactgaagaatctttcatctttctcacagcgtattggttgttcttggttttgctcctgngcacccaaaaa

SEQ ID NO: 13068 - DNA, 429 bp, Bos taurus
  unsure (386): unsure at all n locations; Clone ID: 56-LIB2809-010-Q1-E1-F8
cccgggatacagcagaaaggcctgaatgggcatatctctctggggatagggcactgctttctggggaacaggcaggactttggactgagaaagggacagcacggactgaggaggaaacatgacagttggaggaagaggctggtgaggctggtgcatccaagactggagcagaggcagaggaaggtgcagattttcaacatcagtgagagtcaggctctggctttcagtaaagggctcaactggatatttagggaagggcatttctttgtgcttaggagccatagcctccttcactttggagactcccattacttcaggctgaaggaaaggcggcaccaccacaggggtttgagtaagaggagggatgttttgtgggaggctgttanggatgggcccagggaagggatagactagagactgtgtctgggc

SEQ ID NO: 13069 - DNA, 445 bp, Bos taurus
  Clone ID: 56-LIB2809-012-Q1-E1-F8
accagaatgaagaggattccttgggtggttctcatgtcatggtctgtgacatcaacaaggagatgctaaagattggaaaacagaaagcccgtgctcaaggatacaaagctggacttgcctggatattgggagatgcagaagaactgcccttcgacgataacaagtttgatgtttacaccattgcctttgggattcggaacgtcacacacattgatcagggagtacaggaaacccaccgtgtcctgaaaccaagaagaaggtttctctgtccggagttcaaccaagttaacaatcccctcctatccaggctctatgatgtatatagcttccaggtcattcctgtcctgggagaagtcattgcaggagattggaagtcctaccaataccttgtagagagtatccgacagttcccatctcaggaggaattcaaggagatgatagaaga

SEQ ID NO: 13070 - DNA, 417 bp, Bos taurus
  Clone ID: 56-LIB2809-013-Q1-E1-F8
actttgtattttttcagtctgagaagctgttccagataacccaggtaacgctcagagggcacatcttccttttgaatgtgcttctgctcaacactattgggaacaatttcctcacttgacgaaatgctttcagcttccatttgcttaatatcttccatggcttgatcctcagttgattcactcccaatatccttgctcagttcattgaccttctcctttccaaacacttctggaaaaggtgccacaaaaaacctgagtaaattttcattgaggacttcttgagggagtccttggtgcttgataggatgtttaggcctggcaagagcaacagccacaagacaggtaaggatgagaagtttcatggttgtcaagatcttgaacccaagactgggaagaagcagcaagctgggttgatga

SEQ ID NO: 13071 - DNA, 439 bp, Bos taurus
  Clone ID: 56-LIB2809-014-Q1-E1-F12
acaatgaggaaagctgtctgggaaagggagaaccatagccttggctcagagccttgaggcacagcctgaagacttcctacttaacatctaggaaggctgctttagtgtttttctaggccacgggtctgtctggaatggagagccaatggcctcctatagataccaatgtgtcatctagaaaggatatgctggattcagtttgccacatctcactaggccgactttgtaaccttgtttgtcacctgtctacactgcttaagcatttgatattgaatgaataatgtagagttgatgaaaactttaaaattaaacatgttttcagtcacatgttatttctttgaaactgaggactctgaattttcaacttattgaatctctaataaacactgtaactccaatattttggccacctcatgcgaagacttgactcattgggaaa

SEQ ID NO: 13072 - DNA, 398 bp, Bos taurus
  Clone ID: 56-LIB2809-015-Q1-E1-F12
acagcaaaaaggcctgaatgggtatatctctctggggatagggcactgctttctggggaacaggcaggactttggactgagaaagggacagcacggactgaggaggaaacatgacagttggaggaagaggctggtgaggctggtgcatccaagactggagcagaggcagaggaaggtgcagattttcaacatcagtgagagtcaggctctggctttcagtaaagggctcaactggatatttagggaagggcatttctttgtgcttaggagccatagcctccttcactttggagactcccattacttcaggctgaaggaaaggcggcaccaccacaggggtttgagtaagaggagggatgttttgtgggaggctgttatggatgggcccagggaaggga

SEQ ID NO: 13073 - DNA, 419 bp, Bos taurus
  Clone ID: 56-LIB2809-015-Q1-E1-F8
gggatacttcagcagatacatgatagctcatggtctttgtaatccattcacattcctgagattgaccacctccctcttcctgaatgttctctaaatgtcatcagttttttcctttccatctgaaataaggttatgattttggaggctgaaccctcagagagtctttgtgccaatcccatgggccctaaactgtcaaggagactccagtctcaccaccaggtctttagcctctcaagatgcagctgattatattgctatataggaattgctgataatactcctttcgagccgcctcaacatttttttcagcagcctatccttcccatctctgaaacccttcctctttctcccctacgtcttttctgttgagtgtcatcgtgtagtggttgtttctcagcgcccccctcatccattatttc

SEQ ID NO: 13074 - DNA, 410 bp, Bos taurus
  Clone ID: 56-LIB2809-019-Q1-E1-F12
acagcaaaaaggcctgaatgggcatatctctctggggatagggcactgctttctggggaacaggcaggactttggactgagaaagggacagcacggactgaggaggaaacatgacagttggaggaagaggctggtgaggctggtgcatccaagactggagcagaggcagaggaaggtgcagattttcaacatcagtgagagtcaggctctggctttcagtaaagggctcaactggatatttagggaagggcatttctttgtgcttaggagccatagcctccttcactttggagactcccattacttcaggctgaaggaaaggcggcaccaccacaggggtttgagtaagaggagggatattgtgggaggctgttagggatgggcccagggaaaggatagactagagactg

SEQ ID NO: 13075 - DNA, 457 bp, Bos taurus
  Clone ID: 56-LIB2809-023-Q1-E1-F12
gcgatgggcccgggatacccatttacatagagctccacagcccagaacccattctcgggagtcatggggtcaaatcctttcttcatcacattctccctacacaccccaattgcccagtccgtcctgtctcccacctccacctcccagtaatgtctccccgaggtgaaggcctcacgacccatcacacagggccaggaatcaaatctctctggtttctcaggaagtttctgacgtgaatcttccagtcggacagattttgaatcttcgtacagaaagaggtgggggtgggcagtatctggatccagagtcacatccactgcagggtagcacctcagagcccttaagatattcagagtcactgacctgcatgcaatgtagcccttttccatttgagctcttccaggagtttctctttacagctgaattcattccgcctctgtctggatctttccttgta

SEQ ID NO: 13076 - DNA, 136 bp, Bos taurus
  Clone ID: 56-LIB2809-024-Q1-E1-F8
gcatgcacgtaaccgccgatggccgcgggatacacctgatcaaacggtaacgcaggtgtcctaaggcgagctcagggaggacagaaacctcccgtggagcagaagggcaaaagctcgcttgatcttgattttcagt

SEQ ID NO: 13077 - DNA, 408 bp, Bos taurus
  unsure (372): unsure at all n locations; Clone ID: 56-LIB2809-025-Q1-E1-F8
catgggcgcgggatacattcaaagatgatattcaagggacggctgcggtggctctggccggtctgcttgccgcgcaaaaagtcattgggaaaccgatctcagatcatagaatcttatttcttggagcaggagaggctgctcttggaattgcaaatctgatagttatggctatggttgaaaatggcctctcagaagaagagacacgaaagaaaatttggatggttgacaagtttggtttattatttaaggggcggaaagctaaaatagaaagtcatcaggaagcatttgctcactcagctccagagagcctacctgatacttttgaagaggcagtaaatatacttaagccttcagctataattggagttgcangagctggccgacttttcactcctggtgtaatcaaag

SEQ ID NO: 13078 - DNA, 393 bp, Bos taurus
  Clone ID: 56-LIB2809-027-Q1-E1-F8
ggataccaggaacccatggtctcggcaacgctgtaagttgatagcagccaggtcaaagccgtggatcttgtgagtgggctggaaaagcttgttgcgcagctcactcgtcaccattttatcctgattcatcagtttggacttcttggccagcagaccccgcaccagagggtcaattccaccgtctttgattatcctccaggtgttgaagaagagggtgtgtagggggagctctgcttccggaccccatggctggtaattctcatccaggcgggacacagtggagggaacctccatgtggccaaagcggaaggcaaaggtgaagacattggaaattcggggatccacatagttattatagccttggtagggcgggatccacttctgcatctcact

SEQ ID NO: 13079 - DNA, 439 bp, Bos taurus
  Clone ID: 56-LIB2809-028-Q1-E1-F12
gccatgggcccgggatactagagaagaaagggcaattcattaagtatatttagaatccaagctactactactgagaaattacagtatttattcagttcagttcagtttagtagctcagtcgggtccgactctttgcgaccccatgaatcgcagcacaccaggcctccctgtctatcaccaactcccggagtttacccaaactcatgtccatcgaatcggtgatgccatccagccatctcatcctctgtcgtccccttctcctccagcccccagtccctcccagcagcagggtctttcccaatgagtcaagtcttcgcatgaggtggccaaaatattggagttacagtgtttattagagattcaataagttgaaaattcagagtcctcagtttcaaagaaataacatgtgactgaaaacatgtttaattttaaagttttc

SEQ ID NO: 13080 - DNA, 426 bp, Bos taurus
  Clone ID: 56-LIB2809-028-Q1-E1-F8
gggataaggtcaaaaccccattaggtcactccggcagcatgtgcttttagcttctctcttgactaggagtcacatatccctttgtcagctggccttcagctcctttgcttctgtgtataaaccttggatattactgcattttatatttaccagagctattcgagcaatagtattggaaccactagcctttgaaataaaagtcagccccgttattaacagtgcagatactgagtccacttggatttcttgcagctttctttgcactgctttaggcaaaaagtgttcatctggtttttttcatttgacaccccagtttgctgcagtgacagaacttaatgcctaatctgtagagttcatatatatatatataaaatatatatacccacacaaacacatatatatatgaagtctaatgaactgtccaag

SEQ ID NO: 13081 - DNA, 404 bp, Bos taurus
  unsure (395): unsure at all n locations; Clone ID: 56-LIB2809-029-Q1-E1-F12
acagcaaaaaggcctgaatgggcatatctctctggggatagggcactgctttctggggaacaggcaggactttggactgagaaagggacagcacggactgaggaggaaacatgacagttggaggaagaggctggtgaggctggtgcatccaagactggagcagaggcagaggaaggtgcagattttcaacatcagtgagagtcaggctctggctttcagtaaagggctcaactggatatttagggaagggcatttctttgtgcttaggagccatagcctccttcactttggagactcccattacttcaggctgaaggaaaggcggcaccaccacaggggtttgagtaagaggagggatgttttgtgggaagctgttacggatgggcccagggaanggatagact

SEQ ID NO: 13082 - DNA, 433 bp, Bos taurus
  Clone ID: 56-LIB2809-029-Q1-E1-F8
acaactagatttggagttgatattaatagaaattattccaaaattattcttaggtcacaaataactactatcccacataaaaagggaaaaatcccacccaattaaggaaaaggtatcctgtgtatgtttccatggcaatgagtttatgcattctcagattttgtccggctagttatccaccctttatctgatgcatttattccatctctcagagagaaccatatagattcctgacggcatccaggacacgtggctcgtggtggacacacttcatggtggatactgctactataaaaatactcagaacttaagagaattccaagatgctttataaaaagcattagtcatgcctcaaaactgccctttgaggtaggtcagtattattatcccattttaacagaaggaaaactgaggcacattatagttaaatgac

SEQ ID NO: 13083 - DNA, 246 bp, Bos taurus
  Clone ID: 56-LIB2809-030-Q1-E1-F8
actccttagccatggcggccagcgacatctccctgctggacgcccagagtgcccccctgagagtgtatgtggaggagctgaagcccacccctgagggcgacctggagatcctgctgcagaaatgggagaacggtgagtgtgctcagaagaagatcattgcagaaaaaaccaagatccctgccgtgttcaagatcgatgccttgaatgagaacaaagtccttgtgctggacaacgactacaaaaagt

SEQ ID NO: 13084 - DNA, 379 bp, Bos taurus
  Clone ID: 56-LIB2809-031-Q1-E1-F12
acagaaaaagtaacaaatcgaatgaaaagcaccaataattccatccccagaaacaatcacttttaagatattggcatacgttagtctatttcaacatttctgaaatcatccatggttatctaatttttctcatataatctgtaatgtatttctgtgttgcttcaacttcttaataaaagtaatttacactggctgtgtgaatgtataatagaagagtcttactgatgaacgtgctgaggcaaggaagaaatcagcggtcagttatctgaggctatatcacctgtgaatgtcagaacagggagcttcaggattcataggactgaaaaagtcattctccttctttagacctgcagtatcctcatctacccaagaggagttc

SEQ ID NO: 13085 - DNA, 383 bp, Bos taurus
  Clone ID: 56-LIB2809-031-Q1-E1-F8
tggccgcgggatacaagctattttttttttttttttttttttttttagtgttcaatcatcaggtgtttactgagcactcactgtgtgccaaggactacgctgggggccccagggcacacttggaagcaggttgaaggccaagctcaagaagtttacaatctagttcaaggggaggagagatacaggtgtcaaggccacagcctcagccaagacttttttggggaaaggatgggtgacatctggcaagcaacatcagaacgcattttggagggtgtaagtcttgacagaaggagggtttccgaagacggataggatgtgggattcaatgggaagagctggagcggcaatgcgggcgccttgggcttgagctaggtgtgcttggg

SEQ ID NO: 13086 - DNA, 303 bp, Bos taurus
  Clone ID: 56-LIB2809-032-Q1-E1-F8
ccatgggcccgggatacgcctccagcagaggtccgaggagcctctgcaggaatgtgatgaactgctggtgctccttggactggctcaccttcatgtatcaatctcgttgctcctcaccataatcgctgtcatcatcttcttcatcacttctccaagacaaatgttccggaagcttcttgtcccactgctgctcggcaagactacgactgatatcttcctgatcatcttgctccgccactataagaatgccatactggataaacctgcccactgtttcatggcaaatttgggtaaacgtctggc

SEQ ID NO: 13087 - DNA, 363 bp, Bos taurus
  Clone ID: 56-LIB3057-001-Q1-K1-F12
gaatggcttagcaccaggcgccctacgaacgtgcggtgcgtgacgggcgagggggcggccgcctttccggccgcgccccgtgtcccgggacgaagggctctccgcaccggaccccggtcccgacgcgcggcgggggcgcgccgcgccgtgccccgggggacgcgggcgacggcccgccggcggggacggcgggggaccggctatccgaggccaaccgaggctcccgcggcgctgccgtatcgttccgcctgggcgggattctgacttagaggcgttcagtcataatcccacagatggtagcttcgccccattggctcctcagccaagcacatacaccaaatgtctgaacctgcggttcctctc

SEQ ID NO: 13088 - DNA, 434 bp, Bos taurus
  Clone ID: 56-LIB3057-002-Q1-K1-F8
gaaagacagctcaagaaactcatctctctccgggactggatgctggctgtattggcctggcctgttggggttttcgttgtagcggtgttctggatcatttatgcctatgacagagagatgatttacccgaaattgcttgataattttatcccagggtggctgaatcacggaatgcacacaacggttttgccctttatattaatcgagatgaggacatcacaccacgcgtatcccagcaggagcagcggactggccgccatatgtaccttctctgttggctatatattatgggtgtgctgggtgcatcatgtaaccgggatgtgggtgtaccctttcctggaacacattggcccaagagccagaatcctcttcttcgggtctacaaccatcttaatgaacttcttgtatctgctgggagaagttctgaacagcta

SEQ ID NO: 13089 - DNA, 368 bp, Bos taurus
  Clone ID: 56-LIB3057-003-Q1-K1-F12
cgacgagcggacccgtggacgcgcgaacgaggcggaatcagccatgttcctggtgagctcgttcttgaagggtggcagaggcggcggaggaggcggacgcctgtgcggcggtctagggaatgtgcttggaggccttatcagcggggctggaggcggcggcggatgcggcggcggctgcggcggtggcggctgcggaaccgacatgctgcatgctgagcggtgtcattagcgccatcagtgaggcggctgcgcagtaacaacccagagcccgagcccactcgcacacattactccaacattgaggccaatgagagtgaggaggtccggcagttccggacgctttttgcccagctggctggagatgacat

SEQ ID NO: 13090 - DNA, 353 bp, Bos taurus
  Clone ID: 56-LIB3057-003-Q1-K1-F8
cggacgcgtgggcttgttgggcagccttggcttctgtcatcgtcgtccctgcgccggtgtcgcccccgcaaggctttgccgtcgccggagccacctccagcgactcgtcgcacccgattctctccgcttcgcttaccgccaaccgcaaccattgacgccatgtcgggttattcgagtgaccgagaccgtggccgtgatcgagggtttggtgctcctcgatttggaggtagtagggcagggcccttatctggaaagaagtttggaaatcctggagagaaactggttaacaagaagtggaatcttgatgagctgcctaagtttgagaagaatttttatcatagaacactcccgat

SEQ ID NO: 13091 - DNA, 408 bp, Bos taurus
  Clone ID: 56-LIB3057-004-Q1-K1-F8
actctagctgccccatcatcgctaccgttgggaccctcgccttcgatgaatagggccgtcctttcctcatcatcaaggatcaggaccgcaagtctcgtcttatgggacttgaggccctcaagtctcatataatggcagcaaaggctgtagcaaatacaatgaaaacatcgcttggaccaaatgggcttgataagatgatggtggataaagatggtgacgtgaccgtgaccaatgacggcgccaccatcttaagcatgatggacgttgaccaccagatcgccaagctgatggttgaactgtccaaatcacaggatgatgagatcggagatggaaccacaggagtggttgtgctggctggcgccctgttggaagaagctgaacagctgctggaccgcggcatttacccca

SEQ ID NO: 13092 - DNA, 410 bp, Bos taurus
  Clone ID: 56-LIB3057-005-Q1-K1-F12
gtgctggccgccactgtggggccctgagggtcctgaattcctactgggttggtgaagattctacgtacaaattctttgaggttatcctcattgatccattccataaagctatcagaagaaaccctgacacccaatggatcaccaaaccagtgcataagcacagggagatgcgggggctgacgtctgcaggcagaaagagccgcggcctgtgcaagggccacaagttccaccacactattggtggctctcgccgcgcagcgtggagaaggcgcaatactctccagctccaccgctaccgctaacacacgtaatgtttgtaaagtccttacctaataaacaatttaggacgtttaaaaacatgaagaccttatgaacttgattctaggattgctgcgctcctggaatgaccc

SEQ ID NO: 13093 - DNA, 398 bp, Bos taurus
  Clone ID: 56-LIB3057-007-Q1-K1-F12
cccacgcgtccggttcatttgatgcaaacagcattacaagtctgtcgcaatatgtgaagccacttaccaacttccttgaaaaacttttggaaggcgaaaaggtgatcttggttggacatgattttggaggggtatgtatatcatatgcaatggagatgtttcctcttaagatttccaaggctgtctttattgctgcagcaatgctgactaatggacaaagcactcttgatattatttctcaacaggcaggttcaaatgatcttatgcgacaagcccagacttttgtatatgctaatgggaatgatcatcctcccacttcttttgatctggacaagtcattgtcgagggatttgttattcaaccaaagtcccaccaaagatattggactggcatgtgtc

SEQ ID NO: 13094 - DNA, 429 bp, Bos taurus
  Clone ID: 56-LIB3057-007-Q1-K1-F8
gtatttcgaatctgcacgtgttcgccaccgctccgctgcgaaaatgttccagcggctgcgctgcgtgccccgcgtcctgggtactgccgtcgctggtctccgcgccgccgcgccctccctgccgcggctgcagcccgcgtcccggccatgcgcccggcccttcgggctgctcagcgtgcgtgcgaggtcggtgcagctgcccggcctcctgaagcctcgggggccctgcgcttgcggctgcggctgtagcggactgcacaccgaaggagacaaagctttcgttgacttcctcagcgatgagatcaaggaggaaaagaagatacagaaatataagtctctccccaaaatgtcaggaggttgggaactgggagtgaatgggacggaagccaaattagtgcggaaagttgctggagaaaagatcactgtcac

SEQ ID NO: 13095 - DNA, 414 bp, Bos taurus
  Clone ID: 56-LIB3057-008-Q1-K1-F12
cgccgggttgagaggagcgtggacttctcctctccccgccatggcgtgtgctcgggcgactgatatcagtgtactccgaaaagggggagtcctgtggcaaaaatgtcactgtgcctgctgaggtcaaggctcccattccacccgatattgataactttgttcacaccaacttgcgcaaaaacaacagacagccctatgctgtcagtgaattagcaggtcatcaaaccagtgctgagtcttggggtaccggcagagctgtggctcgaattcccagcgttcgaggtggcgggactcaccgttccggtcagggcgctcttggaaacatgtgtcgtgggggccgcatgtttgcgccagctaagacctgacgacgttggcaccgcatagtgaatacgacgcagaagcgatacgccatct

SEQ ID NO: 13096 - DNA, 414 bp, Bos taurus
  Clone ID: 56-LIB3057-008-Q1-K1-F8
cccacgcgtccgattatgtacaaaacctcaacttactccaatgctaaaatacattattggaacaattatacttatacccctaacctggttatcaaaaaataatataatttgggttaactccacagcacacagccttctaattagctttacaagcctcctcctcataaaccagtttggcgacaacagccttaatttttcactactatttttctccgactccctatccactccactactaattttaaccatatggctcctccctctaatactaatagctagccaacatcatctatcaaaagaaaacctaacccgaaaaaaactatttattactatgctgatctcactacaactattcctaattataacctttaccgccatggaactaatcttattttatattctatttgaagcaac

SEQ ID NO: 13097 - DNA, 412 bp, Bos taurus
  Clone ID: 56-LIB3057-009-Q1-K1-F8
cgacccacgcgtccgggggtttcatccatgttcaacttgagtttaccccaaactatttaactaagatagaaggtgtgtcttttacgatatgggtggtaattgactgtaactgcagaattgtatattctaatacacatcatttataaatgcaacttctttattcaaaaacttacactctctttgatagttcgtgttcaattagcgccagtattctgaaagcacagtatatgaccacaagtctgcaaagagtgcacattaggatatggtaaatgcttcacaagttactttcataaaactgactgccacaactgtgcctttacattgcctgtattttttgatcaaaatattgtgatgccaacgttccttccactgctctaaactataaagcatttttattaatgagttgaaatta

SEQ ID NO: 13098 - DNA, 332 bp, Bos taurus
  Clone ID: 56-LIB3057-010-Q1-K1-F8
cgagactcaaatctccaaggaaaacgcactgaagtaccgagaggccttgaacatcctgcgcggctactacaaccagagcgaggccgggtctcacacctatcagcggatgtacggctgcgacgtggggccggacgggcgcctcctcagcgggttcacgcagttcggctacgacggcagagattacatcgccctgaacgaggacctgcgctcctggaccgcggcggacacggcggctcagatcaccaagcgcaagtgggaggcggccggtgaggcggatagattcaggaactacgtggagggccggtgcgtggagtggctccccagatccctgg

SEQ ID NO: 13099 - DNA, 448 bp, Bos taurus
  Clone ID: 56-LIB3057-011-Q1-K1-F12
gtaaccagaactatgttagtattgcttataaaactttagttaggttcaatatatacatgtatacatctatatataggtatagagatttgcattttgtcttgtaaaattttatttgaacaaattcttcctgtaggtaatgggaaacaaatttaatagttcatatgccactcttagcgtttctatatctgaaaatagcccacgattgaaacttgtaattctaaagttaaaccagcagcctactacaagcacattctttgattgagtcattggttataaacttactattgataaaagcggagaagacagccagtttggggaacttctaagttggtgggatactgtcgattaacaatgtactgtatgaattaagtgatgctttaactctgattttacattttaaagttaagacatgggcattatgtcagcaaacttaagggcattatgtcag

SEQ ID NO: 13100 - DNA, 284 bp, Bos taurus
  Clone ID: 56-LIB3057-011-Q1-K1-F8
gcaaactaaggatgaagatgcagggacttcgcataaacaacagacagtcctaggctagcgaagaattagcacgtcatcaaaccaatacttaatcttggggtaccgccagatctgtggctcgaattcccagagttctacgtggctgcactcaccgaatcagatatggcgcttttggaaacatgtgtcctgacggccgcatgtttgcgcccactaagacctgtcgacgttgtcaccgcaaagtgaatacgacgcagaaacgatacgccatatgctttgcactggct

SEQ ID NO: 13101 - DNA, 438 bp, Bos taurus
  Clone ID: 56-LIB3057-012-Q1-K1-F8
ttcctggtgaagtgtgtttcttgaaatcatcaccaccatggacagcaaaggttcgtcgcagaaagggtcccgcctgctcctgctgctggtggtgtcaaatctactcttgtgccagggtgtggtctccacccccgtctgtcccaatgggcctggcaactgccaggtatcccttcgagacctgtttgaccgggcagtcatggtgtcccactacatccatgacctctcctcggaaatgttcaacgaatttgataaacggtatgcccagggcaaagggttcattaccatggccctcaacagctgccatacctcctcccttcctacccctgaagataaagaacaagcccaacagacccaccatgaagtccttatgagcttgattcttgggttgctgcgctcctggaatgaccctctctatcacctagtcaccgaggtgcgggg

SEQ ID NO: 13102 - DNA, 286 bp, Bos taurus
  Clone ID: 56-LIB3057-013-Q1-K1-F8
gcgaatgattagaggtcttggggccgtaacgatctcaacctattctcaaactttaaatgggtaagaagcccggctcgctggcgttgaaccgggccttgaatgccaattcctaatgggccccttttgggtaaccagacctgcccctgcgggatgaaccgaccgccgggttaaggcgcccgatgccgacgctcatcagaccccaaaaaaggtgttggttgatatagacagcaggacggtggccatggaagtcggattccgctaaggagtgtgtaacatctcacctgcc

SEQ ID NO: 13103 - DNA, 257 bp, Bos taurus
  Clone ID: 56-LIB3057-014-Q1-K1-F8
tcgcggactcgtgtgaagagccaaactccccttgtcacgctgttcaaaaactccatcatcaggaaggcccacaagaagggccagtgagggcgcagcggtcaggggcctctcttcgcggaaagttgaccctgaaggcctctcttctgccctcctaccgtctcgcagcctgggtgaggattcgcccaggcagtgatggctccaggtatcccgactcttaaagctgtctgtagttaagaaataataaccttcaagtttca

SEQ ID NO: 13104 - DNA, 422 bp, Bos taurus
  Clone ID: 56-LIB3057-016-Q1-K1-F12
gtatgaagaagagtatggctcgagcctggaagatgatgtggtgggggatactgcaggggactaccagaggatgttggtggtcctccttcaggctaatagagaccctgatgctagaattgatgaagcacaggttgaacaagatgctcaggctttgttccaggctggagaactgaaatggggaacagatgaagaaaagtttattaccatctttggaacacgaagtgtatctcacttgagaagagtgtttgacaaatacatgactatatccgggtttcaaattgaagaaaccattgaccgggagacttctggcaatttggaacagcttctccttgctgttgtgaaatccattcgcagtatacctgcctaccttgcagaaaccctctactatgctatgaagggagctggaacagatgatcataccc

SEQ ID NO: 13105 - DNA, 398 bp, Bos taurus
  unsure (364): unsure at all n locations; Clone ID: 56-LIB3057-016-Q1-K1-F8
ttgaaatcatcaccaccatggacagcttaggttcgtcgcagaaagggtcccggctgcgcctgctgctggtggtgtcaaatctactcttgtgccagggtgtggtctccacccccgtctgtcccaatgggcctggcaactgccaggtatcccttcgagacctgtttgaccgggcagtcatggtgtcccactacatccatgacctctcctcggaaatgttcaacgaatttgataaacggtatgcccagggcaaagggttcattaccatggccctcaacagctgccatacctcctcccttcctacccctgaagataaagaacaagcccaacagacccaccatgaagtccttatgagcttgattcttgngttgctgcgctcctggaatgaccctctctatcac

SEQ ID NO: 13106 - DNA, 413 bp, Bos taurus
  Clone ID: 56-LIB3057-018-Q1-K1-F8
aaaacaaacgacttctggaaggcatggagatgatatttggccaggttattcctggagccgagagagactgagccctaccctgtgtggtcaggactcccgtccctgcaaactaaggatgaagatgcacgttattccgctttttataacctgctccactgcctgcgcagggattcaagcaagattgacacttaccttaagctcctgaattgcagaatcatctacaacaacaactgctaagcccacattcatcctatccatttctgagatggttcttaatgatccattccctggcaaacttctctgagctttatagctttgtaatgcatgcttggctctaatgggtttcatcttaaataaaaacagactctgtagcgatgtcaaaaaaaaaaattttttattttattaaaaaataa

SEQ ID NO: 13107 - DNA, 438 bp, Bos taurus
  Clone ID: 56-LIB3057-020-Q1-K1-F8
gggtcccggcagcttctagtaggttccagaaggcggcgcgtgcggttgggaacgcggggccgacggagtctattgaacggggttccggaccgggctatggagcaggtaaatgagctcaaagagaagggcaacaaggccctgagtgccggcaacattgacgatgcgctgcagtgctactccgaagccattaagttagacccccagaaccacgtgctctacagcaatcgctctgcggcctatgccaagaagggagactaccagaaggcttacgaggacggctgcaagaccgttgacctgaagcctgactggggcaagggctactcacgaaaagcagcggctcttgaattcttaaaccgatttgaagaagccaagcaaacctatgaggagggtttaaaacatgaagcaaacaatcctcagctcaaagaaggtttacagaat

SEQ ID NO: 13108 - DNA, 384 bp, Bos taurus
  unsure (125): unsure at all n locations; Clone ID: 56-LIB3057-023-Q1-K1-F12
agcatttcttctaggcttttgatgttgagctctagtcttgtagccataatgagcaaagtgattaagagaagctagggtttcttggcgttattaaccagtagtgtggagatattattttcatgtanccaaggaaaagcaaagccttttcttttcagttgtgttgtttgaaagacggacaaacaccttgtctacattctttggctgtttgtaggattacattgtccttatgatactgaaactttacagctgctgtaaattttttataagcgaatatgaaaataatataataggaatataggttgtttttctacatcctcattatttggacctaaatcaatttttaataaagttttatcttagtctgtatgactctgtgattccaaa

SEQ ID NO: 13109 - DNA, 181 bp, Bos taurus
  Clone ID: 56-LIB3057-023-Q1-K1-F8
attagattgtaaaagatggactaactgatgtctactataaaattcatatgggcaactttgctgaaaatactgcaaagaatctgaatattacacgagaggaacaggatacttatgctcttaattcctataccagaagtaaagcatcatgggaagctggaagatttgtaaatgaagttgttcc

SEQ ID NO: 13110 - DNA, 420 bp, Bos taurus
  Clone ID: 56-LIB3057-025-Q1-K1-F12
cgagtccccacgcgcattcaacatgcggattgaaaagtgttatttctgttcgggcccggtctacccaggccacggcatgatgttcgttcgtaacgactgcaaggtgttcagattctgtaaatccaagtgccataaaaacttcaaaaagaagcgcaatcctcgcaaggtcagatggactaaagcgttccggaaagcagctggtaaagagctcacggtggataattcatttgaatttgaaaaacgtagaaatgaacctgtcaaataccagcgagaactgtggaataaaaccattgatgcaatgaagagagttgaagagatcaaacagaagcgacaagctaaatttataatgaacaggttgaagaaaaataaagaactacagaaagttcaggacgttaaagaggtcaagcaaaacatccatct

SEQ ID NO: 13111 - DNA, 406 bp, Bos taurus
  unsure (402): unsure at all n locations; Clone ID: 56-LIB3058-001-Q1-K1-F12
ctctttaactggattgggttcttcctgtctttttgcctgaccacttcagctgcaggaaggtatggggccatttcaggatttggtctctctctaattaagtggatcctgattgtgaggttttccacttacttccctggatattttgatggtcagtactggctctggtgggtgttcctggttctaggctttctcctgtttctcagaggatttatcaattatgcaaaagttcggaagatgccagaaaatttctcaaatctccccaggaccagagtttctctttatttattaaagatgttttctggcgaaggccttcctgcatttatgaattctctcccaagaagcaagagaacacctgcaggaagtgaatcaagatgcggaacacagaggaatcatcacctgctntaaa

SEQ ID NO: 13112 - DNA, 332 bp, Bos taurus
  Clone ID: 56-LIB3058-001-Q1-K1-F8
cggacgcgtgggaaattcactcctctcatctcctgcaaaccttggcttttcaagggtgctgctggggagaaagaagccctggagcatgtggacaagagaggctgttccctgaccttccccactgcctcactctcaataaattaattgttgtcctgccaaaaaaaaaaaaaaaaaaaaaaaaaaaaaaaaaaataaaaaaaaaaaaaaaaaaaaaaaaaaaaaaaaaaaaacaaaaataagaaaaaagataaaacaataataaaataacttgcacaacagataattaaaaaattatacaaaagaaaaaagggggacgccttttaagggaccca

SEQ ID NO: 13113 - DNA, 417 bp, Bos taurus
  Clone ID: 56-LIB3058-002-Q1-K1-F8
gccatggcgtccatgaccggcctctcgcagggcgttctgcccagcaggcgcgccgccaacagggccaggacggccgccgtcgtcagggcgtccgccgaggcgcaggcgcaggcgggccgccgcgccgtgctcgggctggtggccactggcatcgtcggcggcgccttgtcgcaggcggtgcacgccgagaccgtcaagaccatcaagatcggagccccgccgccgccctccggtggactccccgggactctgaactctgaccaggcgagggacttcgacctccccttgaaggagcggttctacctgcagccgctgccgccggcggaggcggtggcgagggtgaagacgtcggcgcaggacatcatcaacctcaagccactcatcgacaagaaggcgtggccgtacgtccagaacgac

SEQ ID NO: 13114 - DNA, 404 bp, Bos taurus
  Clone ID: 56-LIB3058-006-Q1-K1-F8
cgaccgcctaagagtcgcgctgtaagaagtaacaacctcttctctccgccatctgctcggcagccgcgaaacagcaactatgcgtgagtgcatctccatccacgttggccaggctggtgtccagatcggcaatgcctgctgggagctctactgcctggaacacggcattcagcccgatggccagatgccaagtgacaagactattgggggaggagacgacttcttcaacaccttcttcagtgagacaggggctggcaagcatgtgcccagggcagtgtttgtagacctggaacccacagtcattgatgaggttcgcactggcacctaccgtcagctcttccaccctgagcagctcatcacaggcatagaagatgctgccaataactatgctcggagtcactaca

SEQ ID NO: 13115 - DNA, 403 bp, Bos taurus
  Clone ID: 56-LIB3058-008-Q1-K1-F8
gtcgtcgaggggcagcctggacttggtgtctgccctggaggactatgaggagcccttcccggtctaccagaagaaggtgattgatgagtgggcgccggaggaggacggtgaagagaaggaagaggaggacgggcgccacgagcgagggtacagggatgaccgctgtccggcccgggagccgggggacgtgagcgcccagaacccggagccggcgggggcagaaccgccacaaccggcatgccggccccggtgcccaacggcaaccttcacccgcaagagccccaggacctcaggcacaatggcaacgtggtggtggccggccggccgagcggctcccgggccccgagccgggcggtccagaagccccagcccgcaaggggccggctcggcggccggggcccgg

SEQ ID NO: 13116 - DNA, 408 bp, Bos taurus
  Clone ID: 56-LIB3058-011-Q1-K1-F12
aatggcaaggagccatcccgtggcataaacccagatgaggctgtggcatatggtgccgctgtccaggctggtgtgctctctggtgatcaagatacaggtgacctggtactgcttgatgtatgtcccctgacacttggtattgaaactgtgggaggtgtcatgaccaaattgattccaaggaacactgtggtgcccaccaagaagtctcagatcttttctacagcctctgataatcaaccaactgttaccatcaaggtctatgaaggtgaacgacccctgacgaaagacaatcaccttctgggaactttcgacctgactggaattcctcctgcaccccgtggggtcccacagattgaagtcacctttgagatagatgtgaatggcattcttcgagtgacagctgaagac

SEQ ID NO: 13117 - DNA, 355 bp, Bos taurus
  Clone ID: 56-LIB3058-012-Q1-K1-F8
gcaagatccaagacaaagagggcatcctcccagaccagccgaagctgatctttgccgggaaacagctggaaaaaggccggaccctgtctgactaccacaatcaaaagggatccaattcttgacctgggtcttcggcttaaaagggggaatccaatctttcgggaaacctttgaccggtagaaccataacctggcaggtggaggccagtggcaccatcgagaaacgtcaagccaagatccaagacaaagagggcatacccccagaccagcagaggctgatctttgccgggaaacagctggaagatggccgcaccctgtctgactacaacatccagaaagagtccactctgcacctg

SEQ ID NO: 13118 - DNA, 429 bp, Bos taurus
  Clone ID: 56-LIB3058-013-Q1-K1-F8
cggacgcgtgggcggcgttgtcttgaattcccgtcgtaacttaaagggaagctttcacaatgtccggagcccttgatgtcctgcaaatgaaggaggaggatgtcctcaaattccttgcagcaggaacccacttaggtggcaccaaccttgacttccaaatggaacagtacatctacaaaaggaaaagtgatggcatctacatcataaatctgaagaggacgtgggagaagcttctgttggccgctcgggccattgtcgccattgaaaacccggctgatgtcagtgtcatatcctccaggaatactggccagcgagctgtgctgaagtttgctgctgccactggagccactcctatcgctggccgcttcactccgggaaccttcactaaccagatccaggccgcattcagggagccaggcttctggtggt

SEQ ID NO: 13119 - DNA, 204 bp, Bos taurus
  Clone ID: 56-LIB3058-014-Q1-K1-F12
cacatacacactgccattcttcaactataacttctcttatgccattctcaatgagctgcaccacaccaatgttcaataccagctcaagtccaagcacatatcgctatcgcatatgttcagcataatggaacaggtgatgatcgtgttgtgcttcaatgactacttggtcaaccagaccacactgtacaacgtgctcctgaactt

SEQ ID NO: 13120 - DNA, 412 bp, Bos taurus
  Clone ID: 56-LIB3058-016-Q1-K1-F12
gaaaaaggagggttgtccccaaaaagcctcccccatcccctcaatcaacagaggaggatcctgagcacagagtccgggtccgggtcaccaagctccgtcacggaggccccaatcaggatctgactgtcctggagatgaaacgggaaaacccacagctgaaacaaatcgaggggctggtgaaagacctgctggagagggagggactcacagccgaagggaaaattgagatcaaaattgtccgaccagggacagaagggactgaggaggatgcacgttggctgactgatgaggacacaaaaaacctcaaggagattttcttcaatatcttggtgcagggagctgaagaggcacagaaagagcggcagcggcagaaagagctggagagcaattaccgccgggtgtggggctcccc

SEQ ID NO: 13121 - DNA, 364 bp, Bos taurus
  Clone ID: 56-LIB3058-017-Q1-K1-F8
gcaatgggtgacttctggccacactttactgacagctacccctcaggacatggaaaaggagctgggaattaagcacccccttcacaggaaaaagctggttttagcagtgaaagccatcaacaccaagcaggaggagaagtctgcactgctggaccacatttgggtaacacgttggcttgatgatattggcttaccccagtacaaagaccagtttcatgaatccagagtcgacgggcggatgctgcagtacctgacggtgaatgatctgctgttcctaaaagtcaccagccaactacatcatgtcagcatcaaatgtgccattcacgtgctgcacgtcaacaagttcaaccctcattggctgcac

SEQ ID NO: 13122 - DNA, 200 bp, Bos taurus
  Clone ID: 56-LIB3058-019-Q1-K1-F8
ttctagatcgcgagcggccgcccttttttttttttttttagaatatcagtaatatttttattggtcaatcactaaattgtgtttgactctttgtgacctcatggactgtagcatgccactatctcctggggcttgctcagattcatgtccattgagttggcaatgctgtctaaccatctcatcctctccccccccccccc

SEQ ID NO: 13123 - DNA, 317 bp, Bos taurus
  Clone ID: 56-LIB3058-020-Q1-K1-F8
cgaggaccagcagcccggcgcagggaggcggcgccgtggtgtcgacgctgagcccggacttggggttcgtgcgctcagcctcggtgcgctcatgctcctgcagttggtgctggggctgctggtgtgggccctgattgctgacactccgtaccacctgtatccgtcttatggctgggtgatgttcgtcgctgtcttcctctggctggtgacaatcatcttctttgtcctctacctgtttcagctgcacatgaagctgtacatggtgccctggccgctggtgttaatggtatttaacgtgggtgccactgttctctaca

SEQ ID NO: 13124 - DNA, 474 bp, Bos taurus
  Clone ID: 56-LIB3058-021-Q1-K1-F8
caacagtatgactaatgtttgaaattattattttttctaagaatttttctataaccttccaaaagtagtgatgtttatagttactgtaagtcaagtttggaagtccaaaaacataaagactgccttccttttagaaaaaaaacacaaatgcaatttctggccacaagggcatagtgcagttcacgtaagtgtggatatagtttatagtcagcctccttttctcttctgcaaaaggtactgttaagtaaaccaggttttctaagtagtagttcttaaaatttcagacttagaaaaagttggtagtagaattttatttaaggccttaggtattcattttttaatgagtgctttaacttaaagcgcattggaaatagctgctgcaaggtaagcctgcgtgtgatttttttttaagttgacacgtgcagtcgagttgctggttcgttaaagttggatctttttctatgcccatgatga

SEQ ID NO: 13125 - DNA, 465 bp, Bos taurus
  Clone ID: 56-LIB3058-022-Q1-K1-F12
aaagcagagtagtatttttatatttaaatgtaaaaacaaaaaaattatatatatgggtgtgcagataaatgtgtgttttctctttagggagaaaaagccattctggttacggggaacccaaatttgagactaagtagtctggttagaaataaggatctccttttgagtgggcgtggggatgggagaggctgtgctggaagagttggctgtttggggctgatattccctgacgaccacttgagggcttctctctgccctgcttgcccttctgggaggctgacgttggttggttaacaggtggaagcccatgatagcagtagccatcacctgagccccaagtttaaaagacacacatgtacttgtacacacaagggtttggaaatatgaattggctggtcaacttgagcatgttactgacaagggggtattggggtttttttacggtgggactaacatgtcactaaa

SEQ ID NO: 13126 - DNA, 347 bp, Bos taurus
  unsure (302): unsure at all n locations; Clone ID: 56-LIB3058-023-Q1-K1-F8
agctcctggttcaatgaggcaattgacttcatagactccatcaagaatgctggtggaagggtgtttgtgcactgccaggcgggcatttcccgatcggccaccatctgcctcgcttacctcatgaggactaatcgagtcaagctggatgaggcctttgagtttgtgaagcagaggagaagcatcatctcccccaacttcagcttcatgggccagctgctgcagtttgagtcgcaggtcctggccccccactgctcggcagaggcggtgagccccgccatggctgtgcttgactgcagcacctncaccaccaccgtcttcaacttcccggtctccattcccgtccaccc

SEQ ID NO: 13127 - DNA, 411 bp, Bos taurus
  Clone ID: 56-LIB3058-024-Q1-K1-F8
ctaacccgaaaaaaactatttattactatgctgatctcactacaactattcctaattataacctttaccgccatggaactaatcttattttatattctatttgaagcaacactagtcccaacactcattattattacccgatgaggaaaccaaatagaacgcctaaacgccggactctatttcctattctatacactagctggctccctacccctattagtcgcactaatttatatccaaaacacagtaggatccctaaatttcctaatattacagtactgagtacaacctgttcataactcttgatctaatgtcttcatatgactagcatgtataatagctttcatagtaaaaataccactatatggccttcacctttgactacctaaagctcacgtagaagcccccatc

SEQ ID NO: 13128 - DNA, 420 bp, Bos taurus
  Clone ID: 56-LIB3058-026-Q1-K1-F12
ggaggatgtcctcaaattccttgcagcaggaacccacttaggtggcaccaaccttgacttccaaatggaacagtacatctacaaaaggaaaagtgatggcatctacatcataaatctgaagaggacgtgggagaagcttctgttggccgctcgggccattgtcgccattgaaaacccggctgatgtcagtgtcatatcctccaggaatactggccagcgagctgtgctgaagtttgctgctgccactggagccactcctatcgctggccgcttcactccgggaaccttcactaaccagatccaggccgcattcagggagccaaggcttctggtggtcaccgatcccagggctgaccaccagcccctcacggaagcctcttacgtgaacctgccaaccattgccctgtgcaacacggactc

SEQ ID NO: 13129 - DNA, 423 bp, Bos taurus
  Clone ID: 56-LIB3058-027-Q1-K1-F8
ggcccagaaagccagagagagaagagctggaatcaaaacccatgtggaaaaagaggacggggaggcacgtgagagggatgaaatccggcatgaccggcgaaaagagagacagcatgaccggaacctctccagggcagctccagacaagaggtcgaaactgcagagaaatgaaaatcgagacatcagtgaagtcattgctctcggtgtgcccaaccctcggacttccaatgaagttcagtacgaccaaaggctcttcaaccagtccaagggtatggacagtggttttgcaggtggagaagatgaaatttacaatgtttatgatcaagcctggagaggtggaaaagatatggcccagaatatttacaggcccagtaaaaatctggacaaggacatgtatggagatgacctagaagccagaataaa

SEQ ID NO: 13130 - DNA, 268 bp, Bos taurus
  Clone ID: 56-LIB3058-028-Q1-K1-F8
gaaaaaaaaatttttttcttgtccagttatttagaaagataccatgcaatatacgggggtctcctaaactctagaaagtccatgggaagtttggcttaaagaccattttaggaaacttacttggtggtccagttttggggactttgcctttcaacgtgggtggtgtgggttcgatccctggtcaaggagctggaatcccacatgccttggggccatagaagcaaaacataaacagaggcaatattgtggcaaattcaatgaagagttt

SEQ ID NO: 13131 - DNA, 360 bp, Bos taurus
  Clone ID: 56-LIB3058-029-Q1-K1-F8
gaaacggctcagatcctgctgtggcatggggcctatgtgtctcagtcgcgtctgctgtgaagcacacgatgctctatttattgtagaaagtaactttatttgctttctagaattgtttataacagatggtataagagaggtaataaacagagaaaaatctatgcttgtaaagaatacaaaagttaattttacctactataatatgactgtcttaaacttattttctctctgagaaataaatgttctaatgggcagcaaaaaaaaaaaaaaataaaaaaaaaaaaaataataaaaaataaaaaaaaataataaataaaaaaaataaataaaaataatataaaaaaaaagggggattctttt

SEQ ID NO: 13132 - DNA, 441 bp, Bos taurus
  Clone ID: 56-LIB3058-030-Q1-K1-F12
tttggctcggacaggggtgcgcccaagcggggctcaggcaaggatggggaccacgcggccagaaccacccactatggctccctgccccagaaggcgcagcacggccggccccaagacgaaaaccctgtagtgcacttcttcaagaacatcgtgacaccccgcacacctcctacatcgcaaggaaaggggcgaggactgtccctcagcagatttagctggggggctgagggccagaatccaggattcggctatggaggcagagcgtctgactacaaatcggctcacaagggactcaaggggcacgacgcccagggcacgcttttcaaaatcttcaagctgggaggacgagacagccgttccgggtccaagatggcaagacgctgaagcccagctgcctttccaaaaccccggccccagcttcttaatacaaccgacttgacg

SEQ ID NO: 13133 - DNA, 430 bp, Bos taurus
  Clone ID: 56-LIB3058-034-Q1-K1-F8
gtgaatatgtccattccaaggggctttcctttccactcatcggagattcagagggacgagctggccccagctggcacaggcgtgtcccgagaggccgtgtctggtctgctgatcatgggagctggcgggggctccctcatcgtcctctccctgctgctcttgcgccggaagaagccctatggggccatcagccacggagtggtggaggtggaccccatgctgaccctggaggagcagcagctccgtgaactacagcgtcatggctatgagaaccccacctaccgcttcctggaggaacgaccctgaaccaacccctcttcaccccttcagatgagcccagaccttccctcttcctggaacccctgaaccctaactcccagcctgggggagagggtgaaaaagttcatttcagaccctttgtgagggggct

SEQ ID NO: 13134 - DNA, 449 bp, Bos taurus
  Clone ID: 56-LIB3058-035-Q1-K1-F8
gctcactcgcgggcggcgggactaggagtgccatccttcatgttgaagctgaactgcagcttctccgggaaggcgggctctggggatgggggtaccatggacagcgtccctctgatcagccccctggacgtcagccagctccagccatcgtttgctgaccaggtggtcattaagacgcagacggaataccagctgtcctccggggacctgtcgacaaagttctccgacctggagggccagaagctgagcggcggcccggaggacgtgcgcagcaggatgcccacaggccggatgatcgccttcaccatggcgctcatgggctgcctcctgatcatgtacaaggccatctggtacgaccagttcagctgcccagacggcttcctgcttcggcacaagatctgcaccccgctgaccctggagatgtactacaccgagctggaccccgagca

SEQ ID NO: 13135 - DNA, 415 bp, Bos taurus
  Clone ID: 56-LIB3058-039-Q1-K1-F12
aaagccccccgcaatgtcataatacctttacccctctgttcgtatgatccgtaataatgaccgccgtactactactactctcgctccctgtattagcagccggcatcacaatgctattaacagaccggaacctaaatacaaccttcttcgacccggcaggaggaggagaccctattctatatcaacacttattctgattctttggacaccccgaagtctatattttaatcttacctgggtttggaataatctctcatatcgtgacctactactcaggaaaaaaagaaccattcggatatatgggaatagtttgggctataatgtcaatcggatttctaggtttcatcgtatgagcccaccatatattcactgtcggaatagacgtcgacacacgagcctacttcacatcagccac

SEQ ID NO: 13136 - DNA, 449 bp, Bos taurus
  unsure (402): unsure at all n locations; Clone ID: 56-LIB3058-041-Q1-K1-F12
accggcccgacccactcgtccggctggagaacgtgcttcctgcgcacgttgctgagcacttcctggcacggagcctgaagaacgaggagttataccaccagtcctacgactgcgtctgcgtcatgtttgcctccattcctgatttcaaagaattctatacagaatcagacgtgaacaaggagggtttggaatgccttcggctcctgaacgagatcattgccgactttgatgatctgctctccaagccgaagttcagtggtgttgaaaagatcaagaccatcggcagcacgtacatggcagcgacaggtctgagcgcggtgcccagccaggagcacgcccaggagccggagaggcagtacatgcacattggcaccatggtggagtttgcatttgccctggtgnggaagctggatgccatcaacaagcacttcttcaatgacttcaagtta

SEQ ID NO: 13137 - DNA, 426 bp, Bos taurus
  unsure (391): unsure at all n locations; Clone ID: 56-LIB3058-042-Q1-K1-F8
ttgaaaacagcgaatgtcagagttccttaagtctgtgcagagcgaattataattttgaaaatggtccacagaagaataattaacaggttccactcctttctcctctttatgggccacccaccgtatgcgattcgggaagtgaacataaacaagttctgcaggatcatcagtgagtttgcactggagtaccgaaccaccagggagagagttctgcagcagaaacagaaacgggccaaccaccgagagagaaaccagaacccggggaagaatatcactggttcttgccaggtcttttgccggttcccaagggcccttgaccaagcccaagggcttagctacgcggaggatgctggttagcccagaccttgaaggctgtgctgaagacctcgtnccctgccgtggaggatgccaccccggcgctgggcg

SEQ ID NO: 13138 - DNA, 441 bp, Bos taurus
  unsure (418): unsure at all n locations; Clone ID: 56-LIB3058-043-Q1-K1-F8
ctagatcgcgagcggtcgccctttttttttttgtcattggtaaagacaggcatatgatgcgcttgaaaaatggctgctacctccctaatacttaccaattctgaggttcatgaactggctcatatgaagaaaaatttactcctattcatggtcatccttatgatattggcataattactagactgtgagcatatatgttatattcatcgaataagaactttaacaatgatatagatgtatcatagcactagcatatacagcatgatctaaataacatttaactaaaccgacaatcaaagctagtctcgggcttcaacgtagaatatgcagcaggaccatttgccctcttcttcataacagagtacgcatatattatcataataaatatctttacagcaattttattcctaggaacatnccacaatccacacataccagaac

SEQ ID NO: 13139 - DNA, 438 bp, Bos taurus
  Clone ID: 56-LIB3058-044-Q1-K1-F8
cggacgcgtggggaaattaagaaccattcggatatatgggaatagtttgggctatagtgtcaatcggatttctaggtttcatcgtatgagcccaccatatattcactgtcggaatagacgtcgacacacgagcctacttcacatcagccactataattattgctattccaaccggggtaaaagtcttcagctgattggcaacacttcatggaggtaatatcaaatggtctcctgctataatgtgagccctaggctttattttcttatttacagtagggggtttaactggaattgtcttagccaactcttccctcgatattgttcttcacgacacatactacgttgtcgcacatttccactatgttttatcaataggagctgtatttgctattatagggggatttgttcattgattcccactattctcagggtatactc

SEQ ID NO: 13140 - DNA, 386 bp, Bos taurus
  Clone ID: 56-LIB3058-045-Q1-K1-F8
cggacgcgtgggcgcgagcggacgccttattttttttttttttttttttttttttttggatattttttttttatttttttttttattttttttttttttttttttttgggggttaataaagtttaataatatatgaaccatttatttatatttaaaaaaatttgcttgcctaatgaaaaaatgaaaaaaagataccatcaaaaggattaaaactgaacgagtttaattgagagtggaaagtatacggggctataccaaagtcccgaaggagaaaagggggaaaaacggggggaaaaaaattctcaaaacaaatccaaaacccatggggaatttggggaaaaacactgcgcgatacgccttcttttatcgtcgggaccagagttttt

SEQ ID NO: 13141 - DNA, 411 bp, Bos taurus
  unsure (364): unsure at all n locations; Clone ID: 56-LIB3058-046-Q1-K1-F12
cggacgcgtgggtgcgcggcgtcaactttggcatggtgtccacgctgctgcgcgagacgcccagctttggcgtctacttcctcacctacgacgtgctgacgcgcgcgctgggctgcgagccgggcgaccgcctactggtgcccaagctgctgctggcgggcggcacgtccggcatcgcgtcctggctctccacctaccctgtggacgtggttaagtcgcggctgcaggccgatgggctgcagggcgcgccgcgctaccgaggcatcgtcgactgcgtgcagcagagctaccgcgaagagggctggcgcgtgttcacgcgggggctggcctccacgctgctgcgcgccttcccagtcaacgccgncaccttcgccaccgtcaccgtggtgctcagctacgcccgcggcgagg

SEQ ID NO: 13142 - DNA, 433 bp, Bos taurus
  Clone ID: 56-LIB3058-046-Q1-K1-F8
aacaagaaggaggagctcgtggctgattaggccctcaaacacctgaagcaatacgctccactcctggctgtgttcagctcccaaggccagtcagagctgatccttctgcagaaggttcaggaatactgctatgacaacatccatttcatgaaagcctttcagaagattgtggttctcttttacaaagctgatgtgctgagtgaagaagcgatactgaagtggtacaaagaagcacatgttgccaaaggcaaaagtgttttccttgatcagatgaagaaatttgtggagtggttacagaacgcagaagaagaatctgaatctgaaggtgaagagaattaggtggctccagaagcacaatacccaggtcaccacacaacacttttattgggaatgctgaaccatttgagaagagaaacttggctttcggtttcac

SEQ ID NO: 13143 - DNA, 385 bp, Bos taurus
  Clone ID: 56-LIB3058-047-Q1-K1-F12
ggcggagagcgggcgctgctcgcctctttcccaggttcctgacgtggtgcccggggccgtgcactctcggactttcccctcggcgcttccaggcctctcccggaggcgcagtggggtcggcgtccggggcgggaggcgccggtgcggaggggctgcgcgggccgcggctgtgaaggtgccgcggcggctgtggggagctcggcgcggcggggacgcgacgggatggctgcggccggcggcggcggtgcggcggcgggccgaacctactcgttcaaggtggtgttgctgggggaaggctgcgtggggaagacgtcgctggtgctgcgctactgcgagaacaagttcaacgacaagcacatcaccaccctgcaggcatcattcttaa

SEQ ID NO: 13144 - DNA, 429 bp, Bos taurus
  Clone ID: 56-LIB3058-047-Q1-K1-F8
cactttttatgattgacgcccataagtcttgttttcctggcattttttaacggacaagagtaagggacaaaatcttccagtttttcaaagaaacggtcttggcaggcatttggtatttgtgtgtttaaagctttgaatcagctgcctgcctccccctccatcgcccctacatcccacccctaatacatgaacgagtggttatttcattcatggggaagagtgtgtagatttgtagttgttttctctgaaatggagagaaagattgcaaacagctggggctggctgtgctgtgtctccaggcagcagcactggggcaggggcgttggggtggggtggtatttttggtgattagacgtaaggaattccttgtggttgtgatggaatccagtgcagttgtgatttcagtcgatcccatctgggtcccaggaa

SEQ ID NO: 13145 - DNA, 423 bp, Bos taurus
  Clone ID: 56-LIB3058-049-Q1-K1-F12
gttctagatcgcgagcggccgcccttttttttttcgaataaccagctctttgtttcactggtatttactgttatctggtgattcatttctgctctgatttttgttacttctgtccttctactaactttggacttttctagttccttgaggtgtaaggttagattgcttatttaagctctttctttttcttaatgtaggtgtatattactatgaacttccctcttcgaactgcttttgctgcattccgtatgctttggtatgttgtattttcatttccatttgtttcaaaatatattttgctttctcttttgacttcttttttgattcattgattattcaggagtatattatgacatctccacatatttgtgaattttccaggtttcttcttgcagaagaaatttattaagaaaattatttaag

SEQ ID NO: 13146 - DNA, 375 bp, Bos taurus
  Clone ID: 56-LIB3058-049-Q1-K1-F8
ttcatagtaaaaataccactatatggcctccacctttgactacctaaagctcacgtagaagcccccatcgcaggctccatagtccttgcagcagttctactaaaactaggggggtacggtatgctacgaatcacactaattctaaaccctatgaccgactttatagcatacccattcattatactctccctatgaggcataattataaccagctcaatctgcctccgtcaaacggacctaaaatcactcatcgcatactcctctgtaagccacatagcactcgttatcgtagccatccttatccagacaccttgaagctacataggagcaaccggccttaagaatggccacgggcttacattcttcatacctttc

SEQ ID NO: 13147 - DNA, 432 bp, Bos taurus
  Clone ID: 56-LIB3058-050-Q1-K1-F12
gcgggtgcgcgggtcgcctctctgagttatccagttccatccttgtcgctgcggcgacgcccgcattctccgtcgccatgactgaacagatgacccttcgtggcaccctcaagggccacaacggctgggtgacccagatcgctaccactccccagttcccggacatgatattgtccgcctctcgagataagaccatcattatgtggaagctgaccagagatgagaccaactatggtatcccacagcgtgctcttcggggtcactcccactttgttagtgatgtggtcatttcctcagatggccaatttgccctctcaggctcctgggatggaacccttcgcctttgggatctcacaacgggcaccaccactcgccgatttgtaggccataccaaagatgtgctgagtgtggccttctcttctgacaaccggc

SEQ ID NO: 13148 - DNA, 420 bp, Bos taurus
  Clone ID: 56-LIB3058-053-Q1-K1-F8
tctagatcgcgagcggccgccctttttttttttttttttttttttttttttttttttttttttttttttttttttttttttttttttttaaaggaagcaaaaccaactgcttttattgtaaaattttcagggcacaagttgtttcaaaggtttatttcccacatccttaataaaaaaccccagctacaggggcccaattttaactctaaaatgacccctgggaaaaatgaaacctaaggaaaattcttggttttcatcttttgggaactttgcaccaatcagtatatttacatacatcctgccaaaaaaagaattttaaaacatcactgacatggtttacttagtctcatcatgtaacaatgatccaacatttaatctataaaacactggtgtaccacacattaccttaaatataaattt

SEQ ID NO: 13149 - DNA, 440 bp, Bos taurus
  Clone ID: 56-LIB3058-056-Q1-K1-F12
ggatcctgcgccggaggagacgcacgctgctgactttgtcttcgtgcagcccttatcactctctggagaactttctctcccctgggcacaatggcaactcttaaggaaaaattgattgcaccagttgcagaagaagagacaaggatcccaaacaataagatcactgtagtgggtgttggacaagttggtatggcatgtgccatcagcattctgggaaagtctctgactgacgagcttgctcttgtggatgttttggaagataaactcaaaggagaaatgatggacctgcagcacgggagcttattccttcagacaccaaaaattgtggcagacaaagattactctgtcactgccaattccaagatcgtggtggtaactgcaagagttcgccagcaagaaagggagagttccctgaatttggtgcaaaggaacgttaacgt

SEQ ID NO: 13150 - DNA, 446 bp, Bos taurus
  Clone ID: 56-LIB3058-057-Q1-K1-F8
gccgcaccacatttggcccactctgacctacgaggagtggatcaaggtggaggtgcagctcaaggaccttatcttggctgactacggcaagaaaaacaatgtgaatgcggcatcgctgacacagtcagaaattcgggacatcatcctggagatggagatctcagcaccatcacagcagcggcagcagattgctgagattgagaagcataccaaggatcagtcacagctgactgcatcccagactcgcactgccaataagcatggagaccgaaataatcacctgtaccaccagcaactactagacccagactatctactctaagactgaatggagggtcacggccatctctgccgccaacctgcacctatagaccaatcacatctagtgttcatctgatgacatcaacgagactgggtacacctatttccttcccaagaacgtgctt

SEQ ID NO: 13151 - DNA, 395 bp, Bos taurus
  Clone ID: 56-LIB3058-058-Q1-K1-F12
ggacgacttgcggaaggtcacccgcatcgcctactccatggtgaagcagtttgggatggcacccagcatcgggcctgtctccttccccgaggcccaggagggcgtcacgggcatcggacggcgtccattcagccagggcctccagcagatgatagaccacgaagcgaggctgctggtggccactgcctataggcacacggaacaggtgcttcgggacaacctggacaagctccacgcgctggcgagtgccctgctggaaaaggaagtgatcaactacgaggacatcgaggccctcatcggccctccgccccacgggcccaagaaaaagatcgcgccgcagaagtggagcgatgcccagagggagaagcaggactcgggggaagaggagggagcct

SEQ ID NO: 13152 - DNA, 444 bp, Bos taurus
  Clone ID: 56-LIB34-001-Q1-E1-F8
ctcatggtcttagcatggcactgctttgggctctcgctgtcctgagcctccttcccctgctggatgcccagagccccgagtgtgccaacctgatgacagtggcgcccattaccaatgccaccatggacttgctctctggcaagtgggtttaaattggctccgccttccgaaacccccaattccattaattcggcaaaagcatccaagcggctttcttttaccttgagcccaggcacgcagaggacaagctgatcaccagagagtaccagaccattgaggacaagtgcgtctacaactgcagcttcataaaaatctatcgtcagaatgggaccttgtctaaagttgagtcggacagagaacactttgttgacctgctgctcagcaagcacttcaagaccttcatgcttgctgcctcctggaatgggacaaagaacgtgggggtgt

SEQ ID NO: 13153 - DNA, 354 bp, Bos taurus
  unsure (151): unsure at all n locations; Clone ID: 56-LIB34-002-Q1-E1-F8
aaacctgcaggagaaggaggtgatacaggacgtggtggcagaaaaatgaagaggatcctggttttcctccttgctgtagcctttgtgcatgctctagagagaggccgagattatgagaaagataaagtctgcaaggaccttgccagcctgngaagagatgacttcacatctttgtcaatggtcctatacagcagaaaatttcccagtggcacctttgaacagatcagccatcttgtgaatgaagttgtttccttaacagtaacctgctgtgcggaaggggccgatcctgactgctatgacaacaggacttcagcattgtctgacaagtcctgtgaaagcaactctccattccca

SEQ ID NO: 13154 - DNA, 416 bp, Bos taurus
  Clone ID: 56-LIB34-003-Q1-E1-F8
gcgtgaagatgcagcaagcttgcccacgaagatcctgactatggcctccgcgatcttttcaatgccattgccacaggcaactacccctcctggactttatacatccaggtcatgacatttagtgaggcagaaatttttccatttaatccatttgatcttaccaaggtttggcctcacggcgactatcctcttattccagttggtaaattggtcttaaaccggaacccagttaattactttgctgaggttgaacagttggcttttgacccatgcaacatgccgcccggcatcgagcccagccctgacaaaatgctccagggccgcctttttgcctatcctgacactcaccgccaccgcctgggacccaactatctccagatacctgtgaactgtccctaccgtgctcgagtggccaa

SEQ ID NO: 13155 - DNA, 238 bp, Bos taurus
  Clone ID: 56-LIB34-004-Q1-E1-F8
gagttgcacatgttgaccacttcacggctgacatgcggtgatccgctgaattatctgatgaggtcagcttaggtggctctggcatactgatcggaattagaggctgtgcaagacctggcacaccagtgacaattgttgttcgtggatctaacatattggtgactgcagaacctgagcgctctatccatgatactctctgtgtgagtcgctgctgagtgatgacaagagctcttattgc

SEQ ID NO: 13156 - DNA, 379 bp, Bos taurus
  Clone ID: 56-LIB34-005-Q1-E1-F12
gcgccggcgtgacccacccgccatgctccccccagcgctcgtcttgctgttggggtttctctgccacgttgctatcgcaggacgaacctgccccaagccagatgagctaccgttttccacggtggttccactgaaacggacctatgagcccggggagcagatagtcttctcctgccagccgggctacgtgtcccggggagggatccggcggtttacatgcccgctcacaggactctggcccatcaacacgctgaaatgcatgcccagagtatgtccttttgctgggatcttagaaaacggaacggtacgctatacaacgtttgagtatcccaacaccatcggcttttcctgccacacggggttttatctgaaaggagct

SEQ ID NO: 13157 - DNA, 390 bp, Bos taurus
  unsure (339): unsure at all n locations; Clone ID: 56-LIB34-005-Q1-E1-F8
gcagccggacggtgaggcgagctgtctggcctttagcccttcatccttggttaaggagatgaccaaccagtacagtattctcttcaaacaagagcaagcccatgatgatgccatctggtcagttgcctgggggtcaaacaagaaagaaaactctgagacagtggtcacgggatccctggatgacctggtgaaggtctggaaatggcgtgatgagaagctggacctacagtggagtctggagggccatcagctgggtgtggtgtctgtggacatcagccacaccctgcccattgctgcatccagttctcttgatgctcatattcgtctctgggacttggnaaacggcaaacagataaagtctatagatgcaggacctgtggatgcctggac

SEQ ID NO: 13158 - DNA, 405 bp, Bos taurus
  Clone ID: 56-LIB34-006-Q1-E1-F8
atttgggagaagaacattttaaaggcctggtactgattgccttttctcagtatctccagcagtgtccatttgatgagcatgtaaaattagtgaacgaactaactgagtttgcaaaaacatgtgttgctgatgagtcccatgccggctgtgaaaagtcacttcacactctctttggagatgaattgtgtaaagttgcatcccttcgtgaaacctatggtgacatggctgactgctgtgagaaacaagagcctgaaagaaatgaatgcttcctgagccacaaagatgatagcccagacctccctaaattgaaaccagaccccaatactttgtgtgatgagtttaaggcagatgaaaagaagttttggggaaaatacctatacgaaattgctagaagacatccctact

SEQ ID NO: 13159 - DNA, 388 bp, Bos taurus
  Clone ID: 56-LIB34-007-Q1-E1-F12
gctatatacaactccgaaaaggtccaaatgtcgtaggtccatatggcctacttcaacccatcgccgatgcaatcaaacttttcattaaagaaccactacgacccgcgacatcttcagcctcaatatttatcctagcacctatcatagctttaggcctagccttaaccatgtgaattcccctaccaataccctatcctcttatcaacataaacctaggagtcctatttagactagccatatcaagcctagccgtatactccattctctgatcaggctgagcttccaactcaaaatacgcactaatcggagccctacgagcagtagcacagacagtctcatatgaagtaacgctagcaattatcctgttatcagtacgcctaaggagtgg

SEQ ID NO: 13160 - DNA, 402 bp, Bos taurus
  Clone ID: 56-LIB34-007-Q1-E1-F8
atcaacataaagccccccgcaatgtcacaataccaaacccctctgttcgtatgatccgtaataattaccgccgtactactactactctcgctccctgtattagcagccggcatcacaatgctattaacagaccggaacctaaatacaaccttcttcgacccggcaggaggaggagaccctattctatatcaacacttattctgattctttggacaccccgaagtctatattttaatcttacctgggtttggaataatctctcatatcgtgacctactactcaggaaaaaaagaaccattcggatatatgggaatagtttgggctataatgtcaatcggatttctaggtttcatcgtatgagcccaacatatattcactgtcgggatagacgtccacacacga

SEQ ID NO: 13161 - DNA, 412 bp, Bos taurus
  Clone ID: 56-LIB34-010-Q1-E1-F12
acgccggcgaccagcatggaggcggcggcggcggcggcggcggagccggggcggcgggcggtggcggcggggagaactacgatgacccgcataaaacccctgcctccccagttgttcacatcaggggcctgattgatggtgtggtggaagctgaccttgtggaagccttgcaggagtttggacccatcagctatgtggtggtgatgcctaaatagagacaagcattggtggagtttgaagatgtgttgggggcttgcaatgctgtgaactacgcagccgacaaccagatctacattgccggccacccagcttttgtcaattactctaccagccagaaaatctcccgtcccggggactcagatgactcccggagcgtcaacagtgtgcatctctttaccatcctaaaccccat

SEQ ID NO: 13162 - DNA, 379 bp, Bos taurus
  Clone ID: 56-LIB34-010-Q1-E2-F8
caattcgaaaaacttggagagtatggattccaaaatgcgctcatagttcgttacaccatgaaagtaccccaagtgtcaactccaactcgcgtggaagtttcaagaagcctatgaaaagtgggtactacgtgttgtacaaagccggaatcagaaagaatgccctgtactgaatactatctgagcttgatcctgacacggttgtgcgtgctgcatgagaagacatcagtgagtgaaaaagtcaccaagtgctgcacagagtcattgatgaacagacggccatgtttcactgctctgacacatgatgagacatatgtacccaaagcctttgatgagacattgttcaccttccatgcagatatatgcacacttcacgatactg

SEQ ID NO: 13163 - DNA, 425 bp, Bos taurus
  Clone ID: 56-LIB34-012-Q1-E1-F12
agcagagcaactggacctcgcctaagctgtgtctctgactcatttctgactttaggcaagttcttccaatgggaaaaatggcgaagatgtttagtttcatccttgtcaccactgctctggtaatgggcaggggaagctcggctctggagaactgcctccaggagcaggcgcggctcagagcccaagtgtacctgctggagacccgggtcaagcagcaacaagtcaagatctcgcagcttttgcatgagaaacaagtccagctccttgataaaggagaggagaatagtgtcattgaccttggaggaaagaggcaatacgcagattgttcagagattttcaatgacgggtacaagcagagtggatttttataaatcaaacctctccagagcccagcagaattctctgtttaatgtgacatgtccgat

SEQ ID NO: 13164 - DNA, 405 bp, Bos taurus
  Clone ID: 56-LIB34-012-Q1-E1-F8
agtacacctgggacatggcaaagcacggcacagacgatggagtggtgtggatgaactggcagggctcctggtactcaatgaagaagatgtccatgaagatcaggccttacttcccagagcaatagtaccccccacacagagtattattcttccacatgtaataacatttttatatatcatgttatcagaaattttttttcataccttatatctctctaaagctatcaaaatgtagttggtgtgagttttcagaaaaagtttttaggacaaatgacattaaaaacagcacatggttttctttcatatttgtcatttccattgtgtaccaagaagtaactaaaaggatgattgtggacagtcagtgttcataatttccattccagtggattgtgagaagtttcaaat

SEQ ID NO: 13165 - DNA, 381 bp, Bos taurus
  Clone ID: 56-LIB34-013-Q1-E1-F8
ttcgccggtcgacccacgcgaccgatgaacctaagggatgaagacagtacattccaggattctgtgactgatgacacatctcagcagagtatgaataaagacacatctcagtggaaggaccatccacatgagcccctgcacattatcctcgtggggaagagcgggactgggaagagtgccagtgggaacagcatcctcgggagctcggagttccactctcagctgaaagcatagccagtcagcagaagctgtcaggaacgcacgatgacgtggcacgggcaggatgttgtggttgtggacactctaccaatctttcaggagtccagagctgacggggacctatcccagtctaagatcgcagacaaagactgtacgtcctac

SEQ ID NO: 13166 - DNA, 276 bp, Bos taurus
  Clone ID: 56-LIB34-014-Q1-E1-F12
cagatataacaggagattcggacgcatgacacaagatcatggaatctgatgctaagtgaaataggtcagtcatgaagaagataaatactgtacaattcaacttatgagaagtagccagactaatcacatttgtagagacatacggtaaaatgaatcttgccacaggctagagaatgaggaatgtagcgtttcttaatgagcataggattccggttttgccatatgcaaaagttctggagattggttacaaagtgggaatatacgtaatgttgctag

SEQ ID NO: 13167 - DNA, 384 bp, Bos taurus
  Clone ID: 56-LIB34-015-Q1-E1-F8
ccgactcaatggacataggtttgggtggactccgggagttggtgatggacagggaggcttggcattcatggggtctcaaagagtcagacacgactgagtgactgaattgaactgaactgaatggtacatgtactttgtgcatgttaaatcatgtgttttctttagctgataggtataacatcaggccaggacgttaagcttgatgtttataacatcttactaaatttgaacatttaaaatcagtttctaaaaaatgtacattaaaatatccaactatgaggaataaaaactaaagctcattgagatccaagaatctgctgtcagtttcaatggctggaatgcactttccaagctgcttaagtcccttgtagagaaagacccctc

SEQ ID NO: 13168 - DNA, 391 bp, Bos taurus
  Clone ID: 56-LIB34-016-Q1-E1-F12
cggacgcgtggggtgaaagcctgtcagaactacaagaaaacctaggggaggaagctgggagctttgtgtccatgggatgctgttccttgaagtgcgacggcccccgatgctcagcctgcctttcccttttctgtgctcagaggcctgcacactctctagcactttgtccccgagcgtgtttgcctgacatctgctccctttcccagtctccccaccccgggacccactgccttcctccactctggaatgtgggtcagattatagaaacctttgtttctttaaacaaagaaacctttgtttaaacctttgttcttaaaaagtggaatcctcagtacggaacgcagtccttccattgtgccattctaggggaaagctgggtgggaggctgaca

SEQ ID NO: 13169 - DNA, 423 bp, Bos taurus
  Clone ID: 56-LIB34-016-Q1-E1-F8
ggagggaggttgtgtacagcagtgaggagcctgcagaggaacatggcgctgctctgggggctcctggcgctcatcctctcctgcctgtcaagcctgtgctcagcgcagttctctcctgtgagcaccatggagcccttggatctgcagctaatggacgggcaggcccagcagaagctgcccccactttccctcctcaagctggacaaccaggagccaggtggccagattgccccgaagaaggccccagaagactgcaagttgtccccaacccctgagcagacacgcaggctggcccgggccatgatgaccttcaccacagacctcttctccctggtggcccaaagctccaccaggcccaacctcatcctgtcacctctgagtgtggccctggccctgtctcacctggcactaggtgctcagaag

SEQ ID NO: 13170 - DNA, 392 bp, Bos taurus
  Clone ID: 56-LIB34-017-Q1-E1-F12
tgagagcgagaggaggggaaggtaccagttacttcctggacttctctgtgaggaactgttccagtcaccactttcccagacactctcatatctttggattctgcagagcagatttgttctgtgatgtagaagcctctgacttgggaaccccaaaagacattgtcacaaactgtgaagtcttcaaccttaaggaacatagaaacttcagtgctgtgcaacatcatttaggccgtcccttccactctggcgagcatgagcattctcctgctggaaggcctccatttaagcccagtggatctaaagatcatggtcatccccatgagtcatataactttagatgcccacctcctctagaacacagaaatcactcagacagtccaccatttcaagca

SEQ ID NO: 13171 - DNA, 410 bp, Bos taurus
  Clone ID: 56-LIB34-017-Q1-E1-F8
ctctcagaggctctatggcagcagcccgagacccctgggaaatgacagcacagccagcttggagcttatcaatgactgggtggccaagaagaccaacctcaggatcaggcggctgctggacagcctgcctgaggacacccgcctcatcctcctcaacgctgtcgccctgagcgccaagtggaagatagcctttgataaaggcagaacaagcacaaagccctttcacctcaaatcctctgccatcaaagtgcccatgatgaacagcaagaagtaccctgtggcctctttcacagaccggactctgaacgcccgggtgggccgcctgcagctgtctcacaacctcagctttgtgatcctggtgccccagaccgtgaaacaccatctccaagacctggagcaagctctcagca

SEQ ID NO: 13172 - DNA, 393 bp, Bos taurus
  Clone ID: 56-LIB34-018-Q1-E1-F8
aggttctcatgcacctcaactcgatcacggcaacactaattcatcgagctctgcacaagatgggaaagaaatagatgaacaacacctgtatgcacatggcactaagttaggttatagcatgtgaagaaagcttcgatatacctgagtataatgtgataatatggcacatgggaaagtggtgctctccacctcagtgcgtaagacttccttgtggacttccaccttatattcagtatggtgttatatctcacaagaaagacagttaccaatatggagaagaagttacttatgactgtgatgaaaggtttggaactgatggacctgcatctataacatgtttaggatgggaatggtctcgtccgcaagattgcataagcacaaattgtgttaact

SEQ ID NO: 13173 - DNA, 382 bp, Bos taurus
  Clone ID: 56-LIB34-019-Q1-E1-F12
aggaaagagctttaaaagcatggtcagtagctcgcctgagccagaaatttcccaaggctgagtttgtagaagttaccaagctagtgacagatctcacaaaagtccacaaggaatgctgccatggtgacctacttgaatgcgcagatgacatggcagatcttgccaagtacatatgtgataatcaagatacaatctccagtaaactgaaggaatgctgtgataagcctttgttggaaaaatcccactgcattgctgaggtagaaaaagatgccatacctgaaaacctgcccccattaactgctgactttgctgaagataatgatgtttgcagaaactatcaggaagcacaagatgccttcctgggctcgtttgtgtaggaata

SEQ ID NO: 13174 - DNA, 403 bp, Bos taurus
  Clone ID: 56-LIB34-019-Q1-E1-F8
gcggcggcaagatggccgtgcaaatttccaaaaagaggaagtttgtcgctgatggcatcttcaaagctgaactgaacgagtttctcactcgggagctggctgaagatgggtactctggagttgaggtccgagttacaccaaccaggacagaaatcattatcttggccaccaggacacagaatgtacttggtgagaacggccggcggatccgggaattgactgctgtggctcagaagagatttggcttccctgaaggcagtgtagagctttatgctgaaaaagtagccacaagaggactgtgtgccattgcccaggcagagtctctgcgttacaaactcctaggaagccttgctgtgcagggggcctgctatggtgtgctgcggttcatcatgggcagtggggc

SEQ ID NO: 13175 - DNA, 387 bp, Bos taurus
  Clone ID: 56-LIB34-020-Q1-E2-F8
tctcaaccaaccataaagatattggtaccctttatctactacttggtgcttgggccggtatagtaggaacagctctaagccttctaattcgcgctgaattaggccaacccggaactctgcgcggagacgatcaaatctacaacgtagttgtaaccgcacacgcatttgtaataatcctcatcatagtaataccaatcataattggaggattcggtaactgacttgttcccctaataattggtgcgcccgatatagcatttctgcgaataaataagataagcttctgagtcctcactcccgcattcctactactcctcgcatcctctatagttgaagctggggcatgaacacgctgaaccgtgtaccctcccttagcaggcaacctat

SEQ ID NO: 13176 - DNA, 339 bp, Bos taurus
  Clone ID: 56-LIB34-021-Q1-E1-F8
cagacacttgggcggacgcgtggggcacagagtcattggtgaacagacggccatgtttctctgctctgacacctgatgaaacatatgtacccaaagcctttgatgagaagttgttcaccttccatgcagatatatgcacacttcgcgatactgagaaacaaatcaagaaacaaactgcacttgttgagctgttgaaacacaagcccaaggcaacagaggaacaactgaaaaccgtcatggagaattttgtggcttttgtagacaagtgctgtgcagctgatgacaattaagcctgctttgctgtggaaggtccaaaacttgttgtttcagctcaaacag

SEQ ID NO: 13177 - DNA, 397 bp, Bos taurus
  Clone ID: 56-LIB34-022-Q1-E1-F12
caggtgcggactttctatttgaaagtgctgaatgaggagcagaggaaacgcctgtgtgagaacattgcgggccatctgaaagacgcacagctttttatccagaagaaagcggttaagaacttcagcgatgtccatcctgaatatggctcccgcatccaggctcttttggacaaatacaatgaggagaaacctaagaacgcagttcacacctatgtgcagcatgggtctcacttgtctgcaagggagaaagctaatctctgagggtcggaggcctggccctgcaccacgttgccgtccgcttgtgaagcagagcatggtgttcacacctgtacccacggatccctggatggaagattctcctgcactagacatgcgaatgcaagtttgtgtctgtaag

SEQ ID NO: 13178 - DNA, 340 bp, Bos taurus
  Clone ID: 56-LIB34-023-Q1-E1-F8
gtgccaaccatcgacatccacatgaaccagatcaactttgagcgggagtggcacaagttcctggtggagtacatcgcccccatgacggagaaactctacccgggctactagaccagggcccaattcgacctggcctttgtcgtccgctacaagcccgatgagcagccctcgctggtgccacaccacgacgcctccaccttcaccatcaacatcgccctgaaccgggttggagtggattatgagggcgggggctgtccgttcctgcgctacaactgctccatccgagccccacggaagggctggaccctgatgcaccccgggcgactcaggcactagcacg

SEQ ID NO: 13179 - DNA, 382 bp, Bos taurus
  Clone ID: 56-LIB34-024-Q1-E1-F8
ggtgactctcatctgctccaagatgaacccactgtggaccctcctctttgtgctctcagcccccagaggggtcctgtcccaggtgcagctgcgtagtcgggccccagcctggtgaagccctcacagaccctctccctcacctgcacggtctctggattctcattgaaccactacgctgtagcgtgggtccgccaggctccagggaaggcgccagaatgtcttggtggtgtgatgaacggtgaggtcacaggctataatacagtccgtaaaatcgcggctcagcatcaccgtggacagctccaagactcaattctctctgtcactgagcagcgtgacaactgaagacacggccacatactactgtgcgaagagttcagctgcg

SEQ ID NO: 13180 - DNA, 209 bp, Bos taurus
  Clone ID: 56-LIB34-025-Q1-E1-F8
ctagatcgcgaaaactctcccttctttgtgtgtatgttttgttttgtttttcttttttcttgatgcactggacagtgacagccacactcagtacccccacgtgtggggtccatggctcttgaaattgctttttcacttttgatagagaagcaagtgcaggagaatgttttttaaaaattaataatacataaataagaagaatattccag

SEQ ID NO: 13181 - DNA, 333 bp, Bos taurus
  Clone ID: 56-LIB34-026-Q1-E1-F8
gactagttctagatcgcgagcggccgccctttttttttttttttttttataagtcattctgtatttatttggtattcaatgcacttcccttttcctacttttttcttggattttggaaggaaagttattctgtggacaaaggcacagccttataatctcagggaaacattttaatcacttctgtatgatggtaataaaacttaattacagggtataaaaattcaggatgtaaagccggatgtgggagatttattaaaatgggatacctcagactgtgtcttttctgtctgggaagggaagtgcattgagtaccagttaaatacagaatgactt

SEQ ID NO: 13182 - DNA, 294 bp, Bos taurus
  Clone ID: 56-LIB34-027-Q1-E1-F8
ggccattgtcaaggacatcggtgatgaagctgtgctggggctcagtcaccacttctccaagcaacatcgtgtctcccactctggctccacatagcccaccagaccccattccccatgctccggccctgtggattgaaaccactgtctacggcctgctacacctgctgctatgggagggcaaggctgagttggccgaccaggctgcatcctgactgacccgccatggcagcttccaaggtggattccgcagcacccaggacactgttgtggctctggtcgccctgtctgcgtact

SEQ ID NO: 13183 - DNA, 327 bp, Bos taurus
  Clone ID: 56-LIB34-028-Q1-E1-F12
aacaaaactatttttttaataatcaaatttatactagctatatgggaattagcatatctggtaattatgaaactagaatttttttacgtatttttataatattgtgaccgcagtgattggatgagtagcaaataatcatgttggttttaatggtgttgatttttgtaacattaaacttcaaacactttttactttatcacatatctttaggcagcacttcaatatcgaatggtaacgggagtgacactcctcagtgtcactactttgactacttgtcattaactatatattttcactgcatggagtacgaagtgactactcactcca

SEQ ID NO: 13184 - DNA, 285 bp, Bos taurus
  Clone ID: 56-LIB34-028-Q1-E1-F8
gttctagatcgcgagcggccgccctttttttttttttttatgtgttgtcatgcagatataggctgactaggagagtgaatacataggcttggattatagctactgcaaactctagaattgttactaggattagaatggtgaatgtaactaaagcatcacttgcccatttcttaccacaaagaacacccactccactaagcccaatactagtagttattgaaactatcagtctttttattcaacctaaagccctcgccgtgcggttaacagctagcatcactgcag

SEQ ID NO: 13185 - DNA, 418 bp, Bos taurus
  Clone ID: 56-LIB34-029-Q1-E1-F8
ggttatcaaaaaataatataatttgggttaactccacagcacacagccttctaattagctttacaagcctcctcctcataaaccagtttggcgacaacagccttaatttttcactactatttttctccgactccctatccactccactactaattttaaccatatggctcctccctctaatactaatagctagccaacatcatctatcaaaagaaaacctaacccgaaaaaaactatttattactatgctgatctcactacaactattcctaattataacctttaccgccatggaactaatcttattttatattctatttgaagcaacactagtcccaacactcattattattacccgatgaggaaaccaaacagaacgcctaaacgccggactctatttcctattctatacactagc

SEQ ID NO: 13186 - DNA, 412 bp, Bos taurus
  Clone ID: 56-LIB34-030-Q1-E1-F8
gtagagaaagacccctcaaggttgatggctgttggtttcttccaaaggtgttcttcaccttggccttttagtactaagtgagctgttgaaattaccccacagaagtcacactaaagtatgaactagccctgtgactatatatcaaatagttactttagggaaggcatcagtagactagttaagcatagagtttctggaagcatcctgcctaggtttatatcctggctttacaacttactatgtgaatttttgtctcagttttcttgtctataaagtgaggagaaataatagtaattagctcaaagagttgttgaaaggatcaagtgagatcatgcatatagagtacctaaggtagtgcctggcacatagtaaactctcaaaatagttatctgctattattattattgaggag

SEQ ID NO: 13187 - DNA, 418 bp, Bos taurus
  Clone ID: 56-LIB34-032-Q1-E1-F12
gcggcggcggcggcggcagcggcagcggcagcgggctcggaggcagcggttgggctcgcggcgagcggacggggtcgagtcagtgcgttcgcgcgagttggaatcgtagcctcttaaaatggcagatgatttggacttcgagacaggagatgcaggggcctcagccaccttcccgatgcagtgctcagcattacgtaagaatggcttcgtggtgctcaaaggccggccatgtaagattgtggagatgtcaacttctaagaccggcaagcacggccatgccaaggtccatctggttggtattgacatcttcactgggaagaaatacgaagatatctgcccatcaactcataatatggatgtccccaacatcaaaaggaacgattttcagctgattggcatccaggatggatacctatca

SEQ ID NO: 13188 - DNA, 406 bp, Bos taurus
  Clone ID: 56-LIB34-032-Q1-E1-F8
gaccagccaagcctgtgagtgacaccccagacagaggaaccagagccatgcggagtctcagcggactgctgttgttactgactgcctgcctggcagtaaacgccagctccgtgcccacattgcccgatgacattcaagtgcaggagaacttcgacctgtctaggatctatgggaagtggttcaatgtggccgtgggctccacctgcccatggctgaagaggttcaaggagaagatgaccatgagcacagtggtgttgaaagcggggccgacgagcaaggagatcagcgtcaccaacactcacaggcggaaaggtgtctgtgaatcgatctctggtacttatgagaaaacaagcactgatgggaagtttctctatcacaaagccaagtggaatatcaccatggagtc

SEQ ID NO: 13189 - DNA, 350 bp, Bos taurus
  Clone ID: 56-LIB34-033-Q1-E1-F8
agaggacaaggaaccgcccaacatggcatcggagagcgggaagctatggggtggccggtttgtgggcacagtggaccccatcatggaaaagttcaactcgtccagcacgtggcaccggcacctctgggaggcggacgtgcagggcagcaaagcctacagccggggcctggagaaggcggggctcctcaccaaagccgagatggagcacatactccatgggcctggacaaggtagctgaggagtgggctcagggcaacttcaagctaaaccccaatgatgaggacatccatacggccaatgagcggcgtctgaaggagctcagtggtgaaaccgccgggaagctgcacacg

SEQ ID NO: 13190 - DNA, 355 bp, Bos taurus
  Clone ID: 56-LIB34-034-Q1-E1-F12
gattgagtcatttaacatactgctgacagatggcacaatagtccacaatgaatgctccatggtgacctacttcaaagcgcaaatgacacggcagatcttgcaatgtacaggtgtgatactcatcatacactctccagtcagctgaaggaatgctgtgccaaggctatgttggaaacatcgcactgcattgctgaggtagaacaggatgcacatacctgataacctgcccccagtaactgctgacttagctgaatataatgatgtgtgcagacactatcaggaatcaaaagatgccttcctgggctcctttctgtatgcatactcatcagcgcaacatgaatatgctgtcgcactg

SEQ ID NO: 13191 - DNA, 407 bp, Bos taurus
  Clone ID: 56-LIB34-034-Q1-E1-F8
tgctcttgccccgccagaggtggtcatggacccagccttggcagcacagtatgagcacgatttagaggttgctcagacaactgctctcccggatgaagatgatgacctgtgagaaagtgaagctggggcccagcgtcagaagtctagttttataggcaactgtcctgtgatgtcagtggtgcagcgtgtttgccactttattatatagctaagcagaacatgtgcttaatctttggatgctgaaggagatggatgggctttggagtgaatgtggcagttaaaaaaaaaaccttcattttttggacctgcatatttacgtgttttggaacacagttgtttcctccttgagtttcaaatataagactgctatagtcacatgacaatattgagaggtggaatcttgtttg

SEQ ID NO: 13192 - DNA, 429 bp, Bos taurus
  Clone ID: 56-LIB34-035-Q1-E1-F8
caaaatgtgattccagtccagattccgccgaggacgtgcgcaagttgtgcccagactgccccctgctggcgccactcaacgacagccgggtggtgcacgcagtggaggtcgcgctggctaccttcaatgccgagagcaacggctcctacttacagctggtggaaatttctcgggctcaatttgtgcctcttccagtttctgtctctgtggagtttgcagtggctgctactgactgtattgctaaagaagtcgtagatccaaccaagtgcaacctactggcagaaaagcaatatggcttctgtaaggggtcagtcattcagaaagctcttggtggggaggacgtcagagtgacttgcacgttgttccaaacgcagcctgtgattccgcagccccagcccgacggcgccgaggctgaggccccaagcgctg

SEQ ID NO: 13193 - DNA, 371 bp, Bos taurus
  Clone ID: 56-LIB34-036-Q1-E1-F12
aaggaacggtctccaagaagcaatttagaatgactggtaaaacgaaatatacccaaagctcgcagcaacaaaaaaggatacagttctttctggccagcttcctgcttctgccctttctgcgcgtctgcatcgtagagtctctcctgaagctttttattcctaagaagagaaaatcagtcaccggagagattgtccttattaccggagctggacacggtattggcaggcagactgcctacgaatttgccaaacttaactgcaaactggtcctggtggaatataaataagcatggacttgacgaaacagccaccggaatgcaagagactgggtgcataggctcatacctttgtggtaaactgtaataaccgag

SEQ ID NO: 13194 - DNA, 388 bp, Bos taurus
  Clone ID: 56-LIB34-037-Q1-E1-F12
gggaattctctggagaaaagatcagtaagcagagctctggggaatagagctcaaaggcaaagaaaatgctagttaatagtacattgttaatgttaaattgttacttgacaagtttctacaatgcttaaaactgctaagtgtggggaaggaaaaaagcaaaattgttttgctttgctacaagaaggggaagactgaaaagttaactgaaacctgtgtatcagtctcttgaaagattgttatggacttgcatcagcagattaacatctttcactcctttgcaagcttcttaagtggtttatctgaaggtgtgcaatgttcagggactagtttcagaaaagactttcagtacgctaattgtgggcttttaaagtattttgagatttggtac

SEQ ID NO: 13195 - DNA, 423 bp, Bos taurus
  Clone ID: 56-LIB34-037-Q1-E1-F8
caggtgacttgtccgtgtgaaatcggcaccttcggtttttgtaatgttggctttaaatcaggcaggttcagatctagtggaacagtcggtttaactttttaacagatcttagttttttattttgagtgccactattaataatgtaaaaagggagggaggagctaaagcagtcttgatgaaacttaaatatatattctttgtcttcaagatttcaggaagtgtgtaggatgagtaggccgttttaaatgtcagaagtgtaagtgtttttatacaggaaacaaagcccattttgctttccacttagagaagatatatacttttcaagagacataactgaatagttaaccatttgacagaggcccatagatgagcagtgcggggaccggttgccagggtccaaattcggattgatttctctactgc

SEQ ID NO: 13196 - DNA, 427 bp, Bos taurus
  Clone ID: 56-LIB34-038-Q1-E1-F8
gaccttaataaagtgtaattatgtattaccagcagggtgtttttaactgtgactattgtataaaaacaaatcttgatatccagaagcacatgaagtttgcaactttccaccctgcccatttttgtaaaactgcagtcatcttggaccttttaaacacaaattttaaactcaaccaagctgtgataagtggaatggttactgtttatactgtggtatgtttttgattacagcagacaatgctttcttttccagtcgtctttgagaataaggaaaaaatcttcagatgcaatggttttgtgtagcatcttgtctatcatgttttgtaaatactggagaagctttgaccaatttgacttagagatggaatgtaactttgcttacaaaaattgctattaaactcctgcttaaagtgttctaattttctgtg

SEQ ID NO: 13197 - DNA, 438 bp, Bos taurus
  Clone ID: 56-LIB34-039-Q1-E1-F8
ctatggacctggaagtagtggcacttggaaccccggccgccctgagcccggaagtgctggcacctggaaccccggccgccccgagcccggaagtgctggcacctggaaccccggccgccccgagcccggaagtgctggcacctggaaccccggccgccccgagcccggaagtgctggcacctggaaccccggccgccccgagcccggaagtgctggcacttggaatactggaagctctggatcttcaagttttaggccagatagctcaagtcatgggaacattaggccttccagtccagactggggcacctttagagaggaaggaagtgtaagttcagggacaaagcaagagttccacacaggtaaacttgtcactactaaaggagataaagagcttctgattgataatgagaaaggtcactctggtcacacaactac

SEQ ID NO: 13198 - DNA, 410 bp, Bos taurus
  Clone ID: 56-LIB34-040-Q1-E1-F8
ggctacctctacatagcaggcaaatgtggcctggtgcctgtcctggcagagaactacaaaactgagggtgaaagttgcaagaacacaccagaaatacggtatcttgctgtatctgtggttaaagcatcagatgctaatatcaactggaataatctgaaacacaagacgtcctgccacactgcagtatacagaatcgctggctggaacatccccatgggtttgctctacaccaggattaagaactgtagatttgatgaatttttcaacgcaggttgtgcacctggatctccgcgaaattccaatctctgtgctctgtgcattggctcagataagggtacaggaaatgagtgtgttcccaacagcaatgaaagatactatggctatacaggggctttcacgtgtctggtgga

SEQ ID NO: 13199 - DNA, 420 bp, Bos taurus
  Clone ID: 56-LIB34-041-Q1-E1-F8
aaaagtgaacagtatcatttgaaaaatcagtattgtgggtatagctgaggaatgctcataatggtagatcaagggaacatgccatgtgtaccacgattttaacctcgtgctccaaatactggatgttgctctaagggacaagttgtgtctttctagccagcagatctgtaatttgtatagcctcaacagcagttttttaaagatagaggatagattattgaggggactgggctatgtccttttgccttaatttgtgcatattcattaaagtaaaattcattgtgcttaatgatatcaagactaaacggcataacaaagaagtactaatatgaagatgattcctcgtatcaggaatgattaagtatttggtacagtaagttccctatgtaaaaacaagttccgttctgagagccaagttcg

SEQ ID NO: 13200 - DNA, 419 bp, Bos taurus
  Clone ID: 56-LIB34-042-Q1-E1-F12
agaatttttaaaaatacttaaaatggcatatcacacttaaaataaacataattctttaatattatccaatatcaattattactcccctgctactgctgctgctgggtcacttcagtcgtgtccgactctgtgtgaccccgtggacggcagccaccaggctcccccatccctgggattctccgggcaggaacgctggagtgggttgccatttccttctccagtgcatgaaagtgaaaagtgaaagtaaagtcactcagtcgtgtccaactcttaggctcctccatccatgggaatttccaggcaaagtactggagtggggtgccattgccttctccgattattcccctacgttgtgcctaaacttaaaaaatttttttctgaattaggatgcagtgtagacacaatgtctgtgcaaggca

SEQ ID NO: 13201 - DNA, 351 bp, Bos taurus
  Clone ID: 56-LIB34-042-Q1-E1-F8
aggcagggtctgtacagctgttccagtctaggaggatagcactgcagactccagtactagcctgtccagagcagcaagtgagaggaaacaagccagcattgtaagaggacatgcttctcctccctctctccgtgctgctcctgctcacacagccctggagatccctgggagcagaaatgacaaccttttctcagaaaatactggccaatgcctgtaccctggttatgtgtagccccctggagagtggcttgcctggtcatgatggacaagatgggagagaatgtccccatgggagagaagggggatccaggttcacgcagaaccttcagggcgagcaggaaggcctggatg

SEQ ID NO: 13202 - DNA, 388 bp, Bos taurus
  Clone ID: 56-LIB34-043-Q1-E1-F8
tagccacagctccgctttcagccggtgctccggctcgtctggcggcccgtccctccgcaccctcggccgtagcggtcaccacgctctcctgctcagctcgaagccctggccactgcagtcggtgcatgtgccatgggcacggggtctggcggattcccgcggggctccaacttgtactggcttcgtcatgaagaccctcaaactcgcctattccggtgtcatgctatgcacagtctccagcatcgtctctgccctccaggacttgtcttctgtcacttgaggcaataggtcaaacgtatagaagcagcacgaagtcatctcggtgctacaatgggtcctatctttcctcgtactgggagtggccttcaacgtcatcctcatgtacaca

SEQ ID NO: 13203 - DNA, 266 bp, Bos taurus
  Clone ID: 56-LIB34-044-Q1-E1-F12
aactcgcgggccgacccacgcatctatcatgactccgcggagcaggagaggaagccccggtctgtgcgtgtggggctcgttcagaaaatgaccccgcaccccgcggacactcccgtggttaaacaggtcagcgctccatccagaagcatggaagccgtctatgaagtgagagccatgtgtggagtcaacatcatctacttccaagacgcgtggaaaatgccctttgccttctgatcaagagagaagcttctttggacagtatttgc

SEQ ID NO: 13204 - DNA, 409 bp, Bos taurus
  Clone ID: 56-LIB34-046-Q1-E1-F8
agcttttctctgaattcttgtgtcttatttctcattctctcgccgtattgcgctttcagaaaccctgcttgtcaagcgtgtctcgacaagtggtgccgaaatagggacccgaaagtaaatccagcctgagaagctagttcctagccgaggtgaacgtagggaaatctggccagctaggcggaagaggaaagtacttggccaagagcatcatgcacccttgggtagccatcctgggcctcctactccttctgacagatggtgtaacctcttattctcaagtgactggaagaaccggtgagtctgtcaggctagcctgcttatatactggagaaatcacaactgcatgctggggccgatgggaatgttcttggtggagctgcaaagaagacattatcaagactgatggata

SEQ ID NO: 13205 - DNA, 415 bp, Bos taurus
  Clone ID: 56-LIB34-048-Q1-E1-F12
gttcccacggtcccgcagcagatttctgcagcggaactcccgggggcaggatgatttgggaagtcaccgtgttgctcagcttggtcctgggaactggtgctgtccccctggaggaccctgaggacggaggcaagcactgggtggtgatcgtcgcaggatcaaacggctggtataattacaggcaccaggcagatgcatgccatgcctaccagatcgttcaccgaaacgggatccctgatgagcagatcatcgtgatgatgtatgacgacatcgccaactccgaagacaatcccaccccgggaattgtgatcaacaggcccaacggctcagacgtgtaccagggcgtgctgaaggactacacgggcgaggatgtcaccccgaagaatttccttgctgtgttgagaggtgatgcaga

SEQ ID NO: 13206 - DNA, 433 bp, Bos taurus
  Clone ID: 56-LIB34-048-Q1-E1-F8
cagcaacactgacttcgccttcagcctctacaagcagttggctttgaaggaccccaataagaacgtcatcttctcccctctgagcatctccatagccttggccttcttgtccctgggggctcatggccccactgtgacagagatcctggaaggtctcaagttcaacctcacagagacccccgagacagaaatccaccagggcttccagcacctcctgcagacgttcaatcagcccagcaaccagctgcagctgagcgtgggcaacgccatatttgtgccagaggagctgaagctgctggacaaattcaggaaagatgccgaggctttttacgcctctgaggttttatccatcaactttcaagattctgaagctgccgtaaagcttatcaatgaatatgtgaagaataaaacgcatggaaaaattgagaagctc

SEQ ID NO: 13207 - DNA, 325 bp, Bos taurus
  unsure (6): unsure at all n locations; Clone ID: 56-LIB34-049-Q1-E1-F12
aacgcncgccaacgctaggagagtgggaagaattaggacggtgagggtgtgtgtagagcaggtgtggagtgggcatccaggggatgagaggtgatgggagcaggagtcgacgcacgtgtcatagcagtcagagcgcggcggaacttatggttgtgagggcgaggcacgtagtgtcggcgcgagcactagcagtgtgtccgtgtgcagagaggggagaatataaaatgacaatttccccttatgaaaaaaataacttttctaccaacaatagtcgtattatctaccataatactaccactcacgccaatactatcagtgttagaat

SEQ ID NO: 13208 - DNA, 269 bp, Bos taurus
  Clone ID: 56-LIB34-049-Q1-E1-F8
agcaatgctcaatacagatgccgagtgaaacacgttactttggaacaaccccggatagttaagtgggatcgagacctgtaagcagcaccatcgaggtttgtagatgcctcatttgggttggactaattccagattcggttttcgtgctttataacactgagaccctttgatgctatgtgcatataaataagagacggtagtgatgtgactcacatgcatcttcgtttgagtctcattgtgcccggtttctctgtggtgtggtcagtgtg

SEQ ID NO: 13209 - DNA, 227 bp, Bos taurus
  Clone ID: 56-LIB34-051-Q1-E1-F8
gatgcagccttggccctccccgctcacaacttcaacggcagggagcgggtctacttcttcaagggcaaccactactgggaatatgtgttccagcagcagcccagtcaagaggattgtgaaggcagctccctgccggccgcatttaaacactttgccctgatgcagcgggacagctgggtggacatcttccgacttctcttctggggcggttcctatggtggtgctgg

SEQ ID NO: 13210 - DNA, 240 bp, Bos taurus
  Clone ID: 56-LIB34-052-Q1-E1-F12
aaaatcccactgcattgctgaggtagaaaaagatgccatacctgaaaacctgcccccattaactgctgactttgctgaagataaggatgtttgcaaaaactatcaggaagcaaaagatgccttcctgggctcgtttttgtatgaatattcaagaaggcatcctgaatatgctgtctcagtgctattgagacttgccaaggaatatgaagccacactggaggaatgctgtgccaaagatga

SEQ ID NO: 13211 - DNA, 236 bp, Bos taurus
  Clone ID: 56-LIB34-054-Q1-E1-F8
aggcggtggccgctcctccacagcgtttgggaagatggcgccgccggtgacggaaagggggctgaagagcgtcgtgtggcagaagataaaagcaacagtgtttgatgactgcaagaaagaaggcgaatggaagatattgcttctagatgaatttaccactaagcttttggcatcatgttgcaaaatgacagatcttctagcagagggtataactgttgtggagaatatttataaaa

SEQ ID NO: 13212 - DNA, 344 bp, Bos taurus
  Clone ID: 56-LIB34-056-Q1-E1-F12
gtttgtataagttaccaagctagtgacagatctcacaaaagtccacaaggaatgctgccatggtgacctacttgaatgcgcagatgacagggcagatcttgccaagtacatatgtgataatcaagatacaatctccagtaaactgaaggaatgctgtgataagcctttgttggaaaaatcccactgcattgctgaggtagaaaaagatgccatacctgaaaacctgcccccattaactgctgactttgctgaagataaggatgtttgcaaaaactatcaggaagcaaaagatgccttcctgggctcgtttttgtatgaatattcaagaaggcatcctgaatatg

SEQ ID NO: 13213 - DNA, 328 bp, Bos taurus
  Clone ID: 56-LIB34-056-Q1-E1-F8
ctccgggcaggcggcggctctggatccactgcccacaccccgctctcgcagacatgaggaaagagagaacttccttcctcttgcttctggggctcctgttgtctggtttcggcccaagggtcaatggctcccaaaaaaatttaaccccagagaaccagcacaaaggaacttcggtgaatggcaattcataaccttcaaccacaactaatttcgccttcagcctcaacaaccatttggctttaaaggaccccattaagaatgtcatcttctcccctcagagcatctccatagccttggccttcctgtccctgggggctcatgaccacac

SEQ ID NO: 13214 - DNA, 220 bp, Bos taurus
  Clone ID: 56-LIB34-057-Q1-E1-F8
cttttatcacaatccagaactgacaccaacaaaaatattaaaacaaaacaccccttgagaaacaaaatgaacgaaaatttatttacctcttttattacccctgtaattttaggtctccctctcgtaacccttatcgtactattcccaagcctactattcccaacatcaaaccgactagtaagcaatcgctttgtaaccctccaacaatgaatacttcaac

SEQ ID NO: 13215 - DNA, 215 bp, Bos taurus
  Clone ID: 56-LIB34-058-Q1-E1-F12
aaacagtacaactggagtatttgtgtgaatgtaccactgggaaaatctaacatgttgatgttaatcaatgtccttctcaccttgtggttttacactgctcatggacaggggaaacattgtaattatccagtaataagacatggacggctatatcagtcatacagtggatactttccagcacgtgtaaatcaacagtttctctataactgtgatca

SEQ ID NO: 13216 - DNA, 207 bp, Bos taurus
  Clone ID: 56-LIB34-059-Q1-E1-F12
caacaacattactaacctgtggagtcacacatttatgtagtagaagatggagcatcagttttctgtattgtgcaactttacagtagatttcacatttgtttcattatgacaacagcactgtagggacctgtctctaagtaaaggcacaagaaaaaataaggacttcaatccaaagtttggacagtacatggacttctcaaaacttgg

SEQ ID NO: 13217 - DNA, 206 bp, Bos taurus
  Clone ID: 56-LIB34-059-Q1-E1-F8
tagagttaacagaaggagtagaacgtcttcagaaacattccaagatcagtggcagagatttgactttctggcaggagcttgtatccaagtgtttagctgaatattcatcgaacaagtgtgccaaaccaaatgttcagaagttgaaatggattgtttctgggcgtactgcacggcaactgaggcatagttactacagggataaccct

SEQ ID NO: 13218 - DNA, 404 bp, Bos taurus
  Clone ID: 56-LIB34-061-Q1-E1-F8
gaaccagacagcacagccatgctggaggcactgggctccctggtggctgccctctggaccacgctccgtcctggcattgtcctactgggggcctttgtctttctcctctttgctgatttcctcaaaaggcagcacccaaagaactacccaccagggcccctgcgcctgcccttcataggcaatttcttccacctggacttggggaaagggatcttggttcctcagcaggttgtgaagaaatatgggaacattattaggctagattttggtgtaattcatttcatcgttataactggattgccctatatcaaagaagcccttgtcaaccaggaacaaaactttggtaaccgccccaatgatacctcttcagaaacatatctttaacaataaaggcttggtcaggt

SEQ ID NO: 13219 - DNA, 144 bp, Bos taurus
  Clone ID: 56-LIB34-062-Q1-E1-F8
acacctgcagcagaaggaaaatgactgagttgaagtacatttctggattcgggaatgagtgtgcctcagaggaccctcgttgcccaggtgccctgccagaaggacagaataatcctcaagtttgcccctacaatctgtatgctg

SEQ ID NO: 13220 - DNA, 285 bp, Bos taurus
  Clone ID: 56-LIB34-063-Q1-E1-F8
gccggcccaagcagcgtgagctgggcggcagatatggcggacgtgcggacctcccggcacaagaggcagccacggttaatcatttgccggcagccttgaccctcaccctgctcccgcgtctcgctggtcctcacgccaacccacgatgagccatggggtgctgggcccgggtcgccaacccctgccccccgcctgggctgggcctgctgctgctgctgctgctgctgcctcgcggggcacagctccagtctgccacgagccaaagggagccgccaggacacaacg

SEQ ID NO: 13221 - DNA, 437 bp, Bos taurus
  unsure (352),(396): unsure at all n locations; Clone ID: 56-LIB34-064-Q1-E1-F8
caaccctttgacattcagataattgatgacaagggcaatatccagcctcccaacacggaaggaaacattggcatcaggatcaagcccaccaggcccataggcctcttcatgtactatgagaataacccagagaaaacagctgaagtggaatgtggggacttttataacactggggacagagcaactattgacgaagagggctacttctggttccttgggaagagtgacgatgtcatcaatgcatccggataccgcgttgggccagcagaagtagagaatgccctggcagagcacccagcggtggctgagtctgctgtggtgagcagcccggacccggttcgaggcgaagtantgaaggcatttattgtcctgaacccggaattctcgagccgtganccaagcgagctcaacaaggagctgcagcagcatgtcaagtc

SEQ ID NO: 13222 - DNA, 197 bp, Bos taurus
  Clone ID: 56-LIB34-065-Q1-E1-F12
gaggccctggagaagcagcgggccgagggcctccgccggcgcctgctgggcttcactgtggccgagaaagtgcccatgttcgggctggaggccatctggaggaacggccatgtggtgggccatgttcggagggctgactttggattcaccatcaataagaccctggcctacggctacatccgagaccccagcggcgg

SEQ ID NO: 13223 - DNA, 212 bp, Bos taurus
  Clone ID: 56-LIB34-065-Q1-E1-F8
ggcctctccagctcaccatggctcgggcattgagagtgccagttgcactgtggctgttgggcttgtgctggtctttggctaaagcccaccctctggctagagctcctgagcttgggcacggagttgaaggtgggaatgtggccaagccggatccagaagtgacggaacgctgctcggatggctggggctttgatgctaccaccctggatgag

SEQ ID NO: 13224 - DNA, 261 bp, Bos taurus
  Clone ID: 56-LIB34-066-Q1-E1-F8
gagagcaaccccgccgagtgggcagtgtacgccaagttcgaccagtacaggtatactcgaaatcttgtggatcaaggaaatggaaagtttaatctcatgattctatgctggggtgaaggacatggcagcagtatccatgatcacaccgactcccactgctttctgaagatgctgcagggaaatctaaaggagacattgtttgcctggcctgacaagaaatccaatgagatgatcaagaagtctgaaagaatcttgagggaa

SEQ ID NO: 13225 - DNA, 206 bp, Bos taurus
  Clone ID: 56-LIB34-067-Q1-E1-F12
aacgctctcctcgtccatcctcatccgtgttaggtgcagtccgggacaccaggaagatggcaccggctgggggcaaaaatgtcaagaagggcatcctagaacggctaaactctggagaggtcatcatcggagacggagggtttgtctttgcgctggagaagaggggctacgtgaaggcagggccctggaccccagaagctgctgtt

SEQ ID NO: 13226 - DNA, 233 bp, Bos taurus
  Clone ID: 56-LIB34-067-Q1-E1-F8
gggatccgcagtgtccactgcctcccagagaatgtggtggtgaaggaccggcacagaagggtggatggccacacgttagcctccagcaacaccgacttcgccttcagcctctacaagcagttggctttgaagaaccccaataagaatgtcatgttctccccgctgagtgtctccatggccttggccttcctgtctctgggggcccgtggccccaccctgacagagatcctgga

SEQ ID NO: 13227 - DNA, 207 bp, Bos taurus
  Clone ID: 56-LIB34-068-Q1-E1-F8
agcccacaaaactttggcacaatgaagtgggtgacttttatttctcttctccttctcttcagctctgcttattccaggggtgtgtttcgtcgagatacacacaagagtgagattgctcatcggtttaaagatttgggagaagaacattttaaaggcctggtactgattgccttttctcagtatctccagcagtgtccatttgatgag

SEQ ID NO: 13228 - DNA, 237 bp, Bos taurus
  Clone ID: 56-LIB34-069-Q1-E1-F12
cgcaaagcacaccaatggatctctttgtagttctagtgatctgtctttctattttgattttcctttttctatggaatcagaggcatgccaaagggaagctgccacctgggcccactcctctcccaattgttggaaatattctgcagataaatattaagaatgtcagcaaatccataagcaagctagcaggaagattatggtcctgtgttcactccctgtattttggcgatgaagccc

SEQ ID NO: 13229 - DNA, 214 bp, Bos taurus
  Clone ID: 56-LIB34-069-Q1-E1-F8
gcttctgatagatccaagaggactctcctctctcagactacctgtcaccatggaccaccagtttccagccctcacttcagaacagaagaaggcactctcagaaactgcccgacgcattgttgccaatgggaaggggatcctggctgcagatgagtccgtaggcacgatggggaaccgcctgcaaaggatcaaggtggagaacacggaagagaac

SEQ ID NO: 13230 - DNA, 414 bp, Bos taurus
  Clone ID: 56-LIB34-071-Q1-E1-F12
ccgggccgacccacacgtccgttcagcaaggactggtctttctacctgctgtcccacgctgagttcactcccaacagcaaggatcagtacagctgccgagtgaaacacgttactttggaacaaccccggatagttaagtgggatcgagacctgtaagcagcaccatcgagatttgaacattcttcatttggtataatatctggaaaattctgtttccctgctctttaatactgatatgcttttatgctttatgcacataatcagaagtcatattcatgttaccacaaataccttctttataattttaccttgggtgctacatgtccatgtttgaccttcctaggcaggtgtctgcagtggaggtgctggcatcttagaggtggggaagacaatttcagatttaacatcaacatc

SEQ ID NO: 13231 - DNA, 394 bp, Bos taurus
  Clone ID: 56-LIB34-071-Q1-E1-F8
acctttcctcaggcatcaaagcagagaccacgggaacctagttcaccaggctcgaggctggaggccccgccatgacatccctaaggccccttctgatgctggccctgctggcgtgggttgttgtggctgaccaagagtcctgcaagggccgctgcaccgagggcttcaacgccaccaggaagtgtcagtgtgacgagctctgttcttactaccagagctgctgtgccgacttcatggctgagtgcaagccccaagtgactcgtggggatgtgttccatctgccagaagatgagtacgggttccatgactacagcgacgcgcagaccgtcaacagcaacgtggaagcacagcccgagagcaccaccctggcccctgttctgcaggctcagaccct

SEQ ID NO: 13232 - DNA, 399 bp, Bos taurus
  Clone ID: 56-LIB34-072-Q1-E1-F8
agaactaatgagaggggattttgccaaagctaacaacaatgataatacatttaaacaaatatcagaagatctgagaagcagaattgagatcctgaggcgcaaagtcatagaacaagtacaacgtatcaacgttctgcagaaaaatgtcagggatcaactggtagatatgaaacgattggaggtggacattgatattaagatccgatcttgcaaagggtcatgcagtagagctttagaacataaggtagatctggaggactataaaaatcagcagaagcaacttgaacaggttattgccataaacctacttccctctagagacattcaatacttaccattgataaaaatgagtacaattacaggccctgttcccagagagttcaagagccagctccaaag

SEQ ID NO: 13233 - DNA, 448 bp, Bos taurus
  Clone ID: 56-LIB34-074-Q1-E1-F8
cccgggccgacccacgacgtcagatataataagactgaattcaaatggaataaagttaaacaacacctattgaaccaagataatatttttgtagatattcaatatctacaacaaaatatattaaaagcttttaataaatatcttgatgtaatttctggatcagattttcttgatactattgctaataatcttttttcttttaatcccttaaaacagatcaagacatttggatatggaattgctctggttatgggagtgctattaattatgtgtttatgtttctgtatagtctggagaagaatgatcaagagacaatgaagccaacaacagcaactaacatttctcaccatttctcatcatgtgcaaaatcaaaaagggggagatgtaggagacaggaagaataaaagaaaagcaggccccagcaaaggccacaaaagaaatttataat

SEQ ID NO: 13234 - DNA, 388 bp, Bos taurus
  Clone ID: 56-LIB34-075-Q1-E1-F8
gggtcgacccaaacctccaggatgaatcggtgcatctgtcaggctaccctgcttagatactggtgaaatcacaactgcatgctggggccgatgggaatgttcttggtggagctgcaaagaagacattggccatactgatggatacaacatcacttttcagaatgacacacgttatcagctacgaggacatactggcgaaaggaatttgcccttgaccatatcgagtgctgacccatctgacagtggcttgtattgctgccgtattgagaacaaacggtggttcaatgatataataatcactcaagagttgcgtataaaacattcctcatgagacatgtactctgctattcccatctcttcaagactattccactttgttgtgatccac

SEQ ID NO: 13235 - DNA, 412 bp, Bos taurus
  Clone ID: 56-LIB34-076-Q1-E1-F12
cgacccaaacgtcagtctagatccgccgcaacgccaaggatgtggccgtctcctattaccacttctatcgcatggccaaggtgcaccctgaccctggcacctgggacagcttcctgtagaagttcatggccggggaagtgtgctacgggtcctggtaccatcacgtgcacgagtggtgggagctgagtcacacccaccctgttctctacctcttctacgaggacataaaggaggaccccaaaacggagattcagaagatcctggagtttatagggcgctccctgcctgaggagactgtggatcacattgtccagcgcacatctttcagagagatgaagacgaaccccatgaccagctacagcatcatacccactgcagtcatggaccacagcatctctgccttcatgaagaa

SEQ ID NO: 13236 - DNA, 396 bp, Bos taurus
  Clone ID: 56-LIB34-076-Q1-E1-F8
tccgcgcacctccgtcggggccgcgccgccgagccccggccgccccgggccgcccccgcccgccgcccccatgcatcccttctacagtcgggccgccaccatgataggcgagatcgccgccgccgtgtccttcatctctaagttcctccgcaccaaggggctcacgagcgagcgacaactgcagaccttcagccagagcctgcaggagctgctggcagaacattataaacatcactggttcccagagaagccctgcaagggatcaggttaccgttgtattcgcatcagccataaaatggatcctctgattggacaggcagcgcagcggattggactgagcagtcaggagctgttcaggcttctcccaagtgaactcacgctcggggttgaaccgta

SEQ ID NO: 13237 - DNA, 318 bp, Bos taurus
  Clone ID: 56-LIB34-078-Q1-E1-F8
cacaactcactatagagagtcgtattatttttttttctttttttttttcttttctttttctctttttttttttctcttttttttttttttttcaatcaaatttattcactaattaccaacaaccatttgggtaacaaaattgacatttaattattgacatttaatacaacattaaccacttttcattttgcattttccccttcaagattcaccccccttcttttttttcccctctccccccctcctttcccttctcccccccttaccttctactaaaggactcccacacctttccaaaacctcccagttctaaacccc

SEQ ID NO: 13238 - DNA, 302 bp, Bos taurus
  Clone ID: 56-LIB34-079-Q1-E1-F8
ctagttctagatcgcgagcggccgccctttttttttttttttttttttctttgtttttttttttttttttttttagagtcttttcatttgttatgaattgtagcacaaacaacagaggcaaactgtttagacagatttacgttccttagtgagaccggtgggttaacaccaacacaagcggaaagcaggtgaagaagctctgcgttttcatttctctttatgcggcgtactcgcaggggaagctgacaagcgtgtggatgtgtcacgttgaggctatagcggtttgagtcgaaacatcaagt

SEQ ID NO: 13239 - DNA, 424 bp, Bos taurus
  Clone ID: 56-LIB34-080-Q1-E1-F8
aggtgagagtgccctgctggcctggtcctgggtgccggcgtggtgaggaacccagcgctcgcagaggcagccatggggctgctgtctggggacacgctggggcccctggccgtggccctgctcatcttcttgctcttgctggacctgatgcaccggcgctcacgttgggccccacgatacccaccaggccccatgccgctgccggtgctgggcaatctgctgcaggtggacttcgaggacccacgtcccagctttaaccagctgcggcgccgcttcgggaacgtgttcagcctgcagcaggtctggacgccggtagtcgtgctcaacgggctggcggctgtgcgcgaggcactggtgtaccgcagccaggacactgccgaccgtccacctccggccgtctacgagcacctgggtttacgggccg

SEQ ID NO: 13240 - DNA, 438 bp, Bos taurus
  Clone ID: 56-LIB34-082-Q1-E1-F8
aacagccctgacctaggacagtgaatcgataatggcactctccatcacgcggggccttctgctgctggcagccctgtgctgcctggcccccatctccctggctggagttctccaaggacacgctgtccaagagacagatgatacatcccaccaggaagcagcgtgccacaagattgcccccaacctggccaactttgccttcagcatataccaccatttggctcatcagtccaacaccagcaacatcttcttctcccccgtgagcattgcttcagcctttgctatgctctccctgggagccaagggcaacactcacactgagatcctgaagggcctgggtttcaacctcactgagctcgcagaggctgagatccacaaaggctttcagcatcttctccacaccctgaaccagccaaaccaacagctgcaacttgacac

SEQ ID NO: 13241 - DNA, 400 bp, Bos taurus
  Clone ID: 56-LIB34-083-Q1-E1-F12
cccggctcgacacacgcgtcagggctacgtgaaaatggccaaagaccagaacaaccattgtggaattgccacagcagccagctatccaactgtttgagctgatggatggtgatggtagaggacttgaggacagcctatctggaggaattttatcttaaaactgaccaaacccttactgtataagatcatacacttgaatcattgaggatccaagttgtgatttgaatgctgtgacatttttataagggtaaaatgttaccactactttaattactattataaatagctttataatgttgaagactcattgcttaactctaagacttttgaattttcattttttaaaaggatatataaaactctgccttttacaataaattttaattcaataaaaattcgc

SEQ ID NO: 13242 - DNA, 355 bp, Bos taurus
  Clone ID: 56-LIB34-084-Q1-E1-F8
aagaacggtgttggtcctggtgaactacatctactttaaagcccagtggaagacccgctttgaccccaaacacactgagcaggcagagttccacgtgagcaagaacaagacggtggaggtgcccatgatgacccttgaccgggaaaccccttacttccgggacaaggacctgggctgcatgctggtggagctcacttacattaccaacaacagcgccctcttaaccttccctgacaagggcaaaatgcaggacctgaaagcaaacctgaccccggaaacccgaacaaggtgccaaaatccctggaagccaaaccaattccttgactccaactggccaaatttttcaaccaaagcc

SEQ ID NO: 13243 - DNA, 485 bp, Bos taurus
  Clone ID: 56-LIB34-086-Q1-E1-F8
cgggtgacccacacgtccgcagacacaaactatgaggagaggcagtactcggtaggagatgctcccgactatgacagaagccagtggctgaatgaaaaattcaagctgggcctggacttccccaatctgccctacttaatcgatgggactcacaagctcacccagagcaacgccatccttcggtacatcgctcgcaagcacaacctgtgtggggagacagaggatgagatgattcgtgtggacattttggagaaccaggttatggatgtccgcttggccatggctaggatctgctacagccctgactttgagaaactgaagcctggtttcttgaaggagatccctgaaaaaatcaagctgttctcagagtttctggggaagatgccttggtttgcaggggacaagctcacctatgtggatttcctgatttatgacgtccttgacatgcaccgcatatttgatcccaagtgcctggacgcattccc

SEQ ID NO: 13244 - DNA, 419 bp, Bos taurus
  Clone ID: 57-BOVMS1-001-Q1-E1-G10
agcacctatcatagctttaggcctagccttaaccatgtgaattcccctaccaataccctatcctcttatcaacataaacctaggagtcctatttatactagccatatcaagcctagccgtatactccattctctgatcaggctgagcttccaactcaaaatacgcactaatcggagccctacgagcagtagcacaaacaatctcatacgaagtaacgctagcaattatcctgttatcagtactcctaataagtgggtcctttaccctctccacattaattactacacaagaacaaatatggttaatcctcccagcatggcctctagcaataatatgatttatctcaacactagcagaaacaaaccgagctccatttgatttaactgaaggagaatcagagctagtctcgggcttcaacg

SEQ ID NO: 13245 - DNA, 427 bp, Bos taurus
  Clone ID: 57-BOVMS1-001-Q1-E1-G2
ccagactgcttaaatgcacagccctctgtgaaccagcttgtgctttcagttaggtgggtgaccagagcctagaagcaaactcctgcacgtctccagtactccccactcacaccatgttactgtctaggcagtcatcacttgctccacagtatgcacacacaccgtgaccaagatttactatgaaggcagcctgtcagggtctatgcttctaatgtacccttgacttccatttctgtagttcctcaagactgcccagaagaagaaatggagcagtcataaaacactgatcaatgcggctaagtcagaatcaccagaggctatgtaagatactaattatgaaatatgattcattttttgtcattccatgagcttgctgaacactgcatcaataatatattgaatttccatagaactctgtgaatctata

SEQ ID NO: 13246 - DNA, 367 bp, Bos taurus
  Clone ID: 57-BOVMS1-002-Q1-E1-G2
ttagtgttccttgcatcttgggacagaatggaatctcagacgttgtgaaagtgactctgactcatgaagaagaggcctgtttgaagaagagtgcagatacactttgggggatccagaaagaactgcagttttaaagtcttctaatgttgtatcatttcactgtctaggctacacaggattttagttggaggttgtaattcatattgtcctttatatctgatctgtgattaaaacagtaatgttaagacagcctatgaaaaaatcaatttcctaatgttagaaatacgaatggttcataaaaccctgctggatggcaaggaatggttcatgaaaccttgcagctgtaccctgatgctggatggcactt

SEQ ID NO: 13247 - DNA, 370 bp, Bos taurus
  unsure (119): unsure at all n locations; Clone ID: 57-BOVMS1-003-Q1-E1-G10
ctgggaaaccccagcaatgaagagatgaatgccaagaaaattgagtttggacaatttctggccatgttgcaagctaattccaacaacaagggccaagggcactaataagactttgttanggtccgcgtgccttcacaaggaagcaatggcacgtcatggtgctgaactcgcatgtctagcacactaggtgaaaagatgacagaagaagaagtggaagcgctgatggcaggtcaggaagactccaatggctgcatcaactatgaagcttttgtcaagcacatcatgtctaactaaatggagctctcaagatcaagcattgtttatgaagactggctgaaccttattttaagaacacccatgactaactgtc

SEQ ID NO: 13248 - DNA, 309 bp, Bos taurus
  unsure (304): unsure at all n locations; Clone ID: 57-BOVMS1-003-Q1-E1-G2
atgcgacgtcatagctcttctatagtgtcacctaaattcaattcactggccgtcgttttacaacgtcgtgactgggaaaaccctggcgttacccaacttaatcgccttgcagcacatccccctttcgccagctggcgtaatagcgaagaggcccgcaccgatcgcccttcccaacagttgcgcagcctgaatggcgaatgggacgcgccctgtagcggcgcattaagcgcggcgggtgtggtggttacgcgcagcgtgaccgctacacttgccagcgccctagcgcccgctcctttcgctttcntccct

SEQ ID NO: 13249 - DNA, 350 bp, Bos taurus
  Clone ID: 57-BOVMS1-005-Q1-E1-G2
atgcgacgtcatagctcttctatagtgtcacctaaattcaattcactggccgtcgttttacaacgtcgtgactgggaaaaccctggcgttacccaacttaatcgccttgcagcacatccccctttcgccagctggcgtaatagcgaagaggcccgcaccgatcgcccttcccaacagttgcgcagcctgaatggcgaatgggacgcgccctgtagcggcgcattaagcgcggcgggtgtggtggttacgcgcagcgtgaccgctacacttgccagcgccctagcgaccgctcccttcgctttcgtcccttcctttctcgccacgttcgccggctttccccgtcaagctct

SEQ ID NO: 13250 - DNA, 241 bp, Bos taurus
  Clone ID: 57-BOVMS1-006-Q1-E1-G2
atgcaacgtcatagctcttcaaaagtgtcacctaaattcaattcactggccgtcgttttacaacgtcgtgactgggaaaaccctggcgtacccaacttaatcgcccttgaaaaaaaccccctttccccaactgggcttataaccaaaaagcccccaccgaatgcccttcccaaaaatttcccaacctgaatggcaaatgggaacccccctgtaaccgggcattaaaccccgccggttttgt

SEQ ID NO: 13251 - DNA, 219 bp, Bos taurus
  Clone ID: 57-BOVMS1-007-Q1-E1-G2
ccttgaatgcaaattcaaagcccttcaaaagtgtcaccaaaattcaattcacgggccttctttttaaaacttcttaacgggaaaaaccctgggtttacccaacttaacccccttgcaaaaaatccccctttcccaacctggggtaaaaccaaaaaggccccaaccgtttgcccttccaaaaatttgcccaccctaaatggcaaatggaacccccccttt

SEQ ID NO: 13252 - DNA, 396 bp, Bos taurus
  Clone ID: 57-BOVMS1-008-Q1-E1-G2
ggtcgaccgacccgtccgctcactgaacgccactgctttgaaatcgggttgcaatgagaaagcatttgtttttccaccaggctcccaagtgtggtcgttttttttcctcctgatgctgaagaaaaaaaaaaaatgtttgcacggattgcttaattaaaaattgcaaacaaaatctcatttgaagttagcattttggtcattgttgtctttgcttggtcactgtactttccaaaaaaatgcaagctatagaataatcagaaacagttattttagcttaacataatagactctgaaatctttttttcccttagagtaaatatatatatatatatatacacacacacacacacacaataaacagcaatgttaccttaaaaaccatccttctctggattt

SEQ ID NO: 13253 - DNA, 465 bp, Bos taurus
  unsure (435): unsure at all n locations; Clone ID: 57-BOVMS1-009-Q1-E1-G10
gggtcgagccacgcgtcggtcaaattattttttgatagtcttactttacttgaattgttcaaagtacagtatattttaagttaagaaaggtaaactctatgtatttgttttatacttttaaggttccagctcacaaataatgctcttgtgtatgatttgaaaactttcaggcaaaatccaacttacatttttttcctttccctagcaattactttttccagcatcaattcttcttcgttactaatacttttttgactttacaagtgaaatctttcacaaactagttatacagacagaactttgagtacatgatggagaatgaaaaactagagtcagacagctttaattgacattgtcaagacctccagttatcaggaatacatttttttactgccttaacctgtagtgcgtagaatatgcatcaatttcttgaangggattcgtgtttttataagaattttcatg

SEQ ID NO: 13254 - DNA, 430 bp, Bos taurus
  unsure (191): unsure at all n locations; Clone ID: 57-BOVMS1-009-Q1-E1-G2
cgggtcgacgacgcgtccgtttcagaagggaatttaacaagggcttaagaatctttaaggccaatttaaccctaagacaaggaacgggaaattaacacagcaataacgcatagaaacttcagtggaaatgggaatctccaactataatgtcatgtaagggaaccactatccagctacatctggtgactganaacttgaaatatggcaagtgtgactgcagaactgaatttttcattgtatctcattttaattaactaaaatagccctatgtgactcatgaatacatactgaacgggtcagctctcagtacacattcatatttgggttgttacatcaggaaataaaatgtgtttttaaaaattacaaaagtcagtatgtagagaagtcagttggtacaaaaaatccaatcccaaaaaggtcaattttggtt

SEQ ID NO: 13255 - DNA, 391 bp, Bos taurus
  Clone ID: 57-BOVMS1-011-Q1-E1-G10
cactaataaaaattgtaaacaatgcattcatcgaccttccagccccatcaaacatttcatcatgatgaaatttcggttccctcctgggaatctgcctaatcctacaaatcctcacaggcctattcctagcaatacactacacatccgacacaacaacagcattctcctctgttacccatatctgccgagacgtgaactacggctgaatcatccgatacatacacgcaaacggagcttcaatgttttttatctgcttatatatgcacgtaggacgaggcttatattacgggtcttacacttttctagaaacatgaaatattggagtaatccttctgctcacagtaatagccacagcatttataggatacgtcctaccatgaagacaaatatc

SEQ ID NO: 13256 - DNA, 456 bp, Bos taurus
  Clone ID: 57-BOVMS1-012-Q1-E1-G2
gagcaagagaagccacctttactgtgcagctggacgtcctggcaaaagaacacagaagagcaccaatgttcatctacaaaccacagagtaaaaaagtgtttgagggagaatcagtgaagcgagaatgccagatctcggctgtacctccaccaaagcttttctggaaaagaaataatgaaatggtacaattcaacactgatcgaataagtttatatcatgataactctggaagagttactttattgataaaagatgtaaacaagaaagatgctggatggtatactgtgtctgcagttaatgaagctggagtgaccacatgtaacacaagattagatgttacagcccgtccaaaccaaactcttccagctcctaaacagttacgtgtccgaccaactttcagcaaatatttagcacttaacgggaaaggtctgaatgtgaaacaagcttttaaccctg

SEQ ID NO: 13257 - DNA, 172 bp, Bos taurus
  Clone ID: 57-BOVMS1-013-Q1-E1-G10
gacttactcatcaatgcaacgtcatagctctgctatggtgtcataaagtttcaattcactggtcgtcgctgtacaacgtccttacagggaaaaccctggcgttacccaacttattcgacttgcagcaaatcgtcctttcgacatgaggtgtaacaccgaagaagccagcacc

SEQ ID NO: 13258 - DNA, 464 bp, Bos taurus
  Clone ID: 57-BOVMS1-013-Q1-E1-G2
ccaacatcaaaccgactagtaagcaatcgctttgtaaccctccaacaatgaatacttcaacttgtatcaaaacaaataatgagtatccacaattctaaaggacaaacatgaacattaatattaatatctctgatcctatttattggatcaacaaacctactaggcctattaccccattcattcacaccaacagcacaactatcaataaacctaggcatagccatccccctgtgagcaggagccgtaattacaggattccgcaataaaactaaagcatcacttgcccatttcttaccacaaggaacacccaccccactaatcccaatactagtaattattgaaactatcagcctttttattcaacctatagccctcgccgtgcggttaacagctaacatcactgcaagactactattaattcacctaatccgaagagctacacttgcactaataagcattaacac

SEQ ID NO: 13259 - DNA, 340 bp, Bos taurus
  Clone ID: 57-BOVMS1-014-Q1-E1-G2
gctttttaaacagcatctcatagttccgtaatgtaggcacttctgttcgcattgtgacttttgtaacctaacatgtaagggtatatttgggagtgactacaagtgtttctttttccaacagtatgcaactgactctgattagtaatcccttcttaacctttcctgagtcactaaattgttcatggtacatgtatttcacagattacaatagtttttaggttgtcaccagtttggcgtataaatctgggaaacatttgattctacattttactgtggaatagaaatccacctgattacatactttatacttttcataattataccaaccgatgatttttga

SEQ ID NO: 13260 - DNA, 449 bp, Bos taurus
  Clone ID: 57-BOVMS1-016-Q1-E1-G2
ctttgatgactggtaaaatgaatcctcagacggccttctttcaaggcaaattgacaatcaatggcaacatgggtctggctatgaagttacaaaatctccagcttcagcctggcaaagctaagctgtgaactccctttgcctcctttgaaaatcaagatgagatatatagatatatatccatatatttcattgtcagaacttagattgaaactatacattgggaaatagcatgaggtttgtttttaaatgggtgtgatcaattctgttttttctaagtgctgggtgaatagaacctgatggtttactactgctttgctgagttgcaaacaactgtgcattacacagttaatatggtaatcatggtctggggtaaaattgagttttagaataaagttagaaataacaaaatacaaaaagtatggtaacagaagctctcaatttgctaataa

SEQ ID NO: 13261 - DNA, 348 bp, Bos taurus
  Clone ID: 57-BOVMS1-019-Q1-E1-G2
gaaaaaaaaagaaaaaataaaaaataaaaaaaataaaaaaaaaaaaaaaaaaaaaaaaaaaaaataaaaaaaaaaaaaaaaaaaaaaaaataaaaaaaaaaataggaataaaaaaaagggaaaaaaaaatcatacaaataaaaaaggggtcggcctttgggggggttccccatgaattttccctttcagttacgtttaaagctcttcaaaagggctctcaaaatttcatttaaaggtcatttccttttacaatttttttaacgggaaaatcctgggggttaaccagttttttatcccttttaaatacaatttcaatttacctcacttttcaaaatcgggggatgccca

SEQ ID NO: 13262 - DNA, 446 bp, Bos taurus
  unsure (424): unsure at all n locations; Clone ID: 57-BOVMS1-023-Q1-E1-G2
acgcgtccgcaataataaaaattgtaaacaatgcattcatcgaccttccagccccatcaaacatttcatcatgatgaaatttcggttccctcctgggaatctgcctaatcctacaaatcctcacaggcctattcctagcaatacactacacatccgacacaacaacagcattctcctctgttacccatatctgccgagacgtgaactacggctgaatcatccgatacatacacgcaaacggagcttcaatgttttttatctgcttatatatgcacgtaggacgaggcttatattacgggtcttacacttttctagaaacatgaaatattggagtaatccttctgctcacagtaatagccacagcatttataggatacgtcctaccatgaggacaaatatcattctgaggagcaacagtcatcancaacctcttatcagcaatccca

SEQ ID NO: 13263 - DNA, 455 bp, Bos taurus
  Clone ID: 57-LIB188-001-Q1-E1-G2
atggccgcgggatactcagtaacttgaattcatctcatggaaatcctttggaagctacaaaatcaaagacgatctggagcttattgctggctaggaaacgccgctcgacgaactcgccgcttggggtccggatccgcagtttgctcacaggctcagcaatttcttcctttggctcatgaggcaaggcctgctctaaggagagtctgatggcctcacgttcatcttcttgttcttttcgaatctgttccaaacgaaactgttctgccatctctctctcatgagcttccctctttgctctgtcagcctcaagtgaaaggcgataggcctcatcttgttcactcttcacattttctctggcttctcgttcatcctcatcctttatatcttcctgttgttgggctgtgaagatctccattgcagccatgagtctcatcattaactcatccactgttgtg

SEQ ID NO: 13264 - DNA, 443 bp, Bos taurus
  Clone ID: 57-LIB188-002-Q1-E1-G2
atggccgcggcatacattcaaggggggagccggctcccctgacgtgcaaatgatggggcccagggccctaccaagtcagcagcagtggggtatggggaagctgtgcctctccctggaagttgggacaagcacagttctggggagagaacatgttggggaaaaggatggtcacgtgatcacaaaagcatcaggggtcagaggtcacgttcccagcaggctccagtgaatcaaaccagtaaaagcaaaagcccatggagggaagagaagggcggccggggagtctggctgtggggggtgagctggtccacagaggccagcccagcccagggccccgtcaccagttcatgatgcagttacggttcacaggtcatgaattaacttgggtgctgccccccgagcggaccgaggcgagaaataccttgtcgttccgctcacacaggaac

SEQ ID NO: 13265 - DNA, 405 bp, Bos taurus
  Clone ID: 57-LIB188-003-Q1-E1-G10
gcccaagatccagcagctggtcgaggacattgccatcctcacgctgctggcgatctccgagctcaacgagctcctgaagaagacactgagggatcaaagatgtcaggttgatgccatatgggtggcatggtgcctggggctgcccctgcgccaaaaaccccggaggcatcataataggacgtccccgacgaacatggaacgggcacatttcattgttcgcctgacacatgcaaaccccgtggacaaggtgaagctgatcaaggagatcccaaactatgtccagggcattaaccgcgtccatgcatagaaactggcggaatcgctgcctcaggaaatcaatgccaacgtggccaaggccgaggccgagaagatcaagcggccctgggagcactgggcggcaccgtg

SEQ ID NO: 13266 - DNA, 206 bp, Bos taurus
  Clone ID: 57-LIB188-003-Q1-E1-G2
ccatggccgccggatactaccagtcaaccctcaggggtcacctaccgacactcaggctcaaggtctggcatgccatccaacctgaccatcgattgacgccagcctgacgacgaagcgagttacttctgtgctactggctacggcagtcagccatcagctgttttcggcatcgggatcacactgatcgtcctgggtcagcccaagtc

SEQ ID NO: 13267 - DNA, 390 bp, Bos taurus
  Clone ID: 57-LIB188-005-Q1-E1-G10
gggacactgagtgacctgaggcctccggaggaagaaccggtcctggaagagctcgtccatgatgctggacgcccgggtgaagctgtcctccatgacgtccatcacgtggctctgctcccggtcattctccatcagggaatcgatacggtcaccgttgatccagaagtagaagggggagctctggtttaggaactcctcaagctggtggccaaccagtcccgatccgcttctgcacacccgcgcgtagaacttcatgcaggtctgcttgaggcagggcttacattcctcccaaagggctgtcatggtctcattgcacaccccctgggacgccttcagcttgttttcagaatccctggtgtcattcagggcgtcctctttcttcttcttggc

SEQ ID NO: 13268 - DNA, 397 bp, Bos taurus
  Clone ID: 57-LIB188-005-Q1-E1-G2
ggcggccggacacacgcgcgacaaccactgggctgtcggacacttaatgggaaaaaagagtgtggcagagtccccacaacttcatgaggaggagagcctgaaggagcagctgagggagtatgcccagtgggaagaagcgacaaggaacttgctaagcctcctacaagcaaagggggcccgaggccaccagatgcctccatgggagcccctgagcattcaccagcctgcctgggattccgaggacgtcagcaacttcaaagacacaggtcctcagcatgaaggaaggaacccccagctgaactgacaatgacgatggccgcctccctcaaagaagcaaaacaaaatccttaagaaactgcgttctatgggcatcagttctactggatcatcaacaaat

SEQ ID NO: 13269 - DNA, 213 bp, Bos taurus
  Clone ID: 57-LIB188-006-Q1-E1-G2
tgggcgcggcatactgtcccaactgtaagaagcaccagcaggccacaaagaagtttgacctgtggtccttgccgaagatcctggtggtccacctcaaacgtttctcctacaatagatactggagggataagcttgatacagtcgtggagttcccagtcagaggtctgaacatgtcggagtttgtctgtgacccgtcagcgaggccatatgtgt

SEQ ID NO: 13270 - DNA, 397 bp, Bos taurus
  Clone ID: 57-LIB188-007-Q1-E1-G2
tcccgaacgccaagggcgcgggatacgccgatacctggggccaaggactcctagtcaccgtctcctcagcctccaccacagccccgaaagtctaccctctgagttcttgctgcggggacaagtccagctccaccgtgaccctgggctgcctggtgtccagctacatgcccgagccggtgaccgtgacctggaactcgggtgccctgaagagcggcgtgcacaccttcccggctgtccttcagtcctccgggctctactctctcagcagcatggtgaccgtgcccggcagcagctcaggacagaccttcacctgcaacgtagcccacccggccagcagcaccaaggtggacaaggctgttgatcccagatgcaaaacaacctgtgactgttgcccaac

SEQ ID NO: 13271 - DNA, 442 bp, Bos taurus
  Clone ID: 57-LIB188-008-Q1-E1-G2
cgggatacaagctttattttaatttttatttctttatttttcaaaatcaaaaccatttccaattttatttcttgctaaaatgacatcaaggaattgtacacactgatgaccttggcatacatccgacttcaggaacggacaggatcgtccatcgcgcctggaaattggggctgagagcagggacgatctgaggcccatggaggcaggctagcttctttgcaagctttacctcgtcatgaatgcacaggcttccaaaagcggggaggttgaacattttttcaggttggcaatggccgtgacagacactgtctccaaatattcttcacacgttggtcagcttccaagtttggccagacactcaatgttgtcactgaacagaacgtttttggtttcatatttgaacaagcaaaacttgtccgggcagttttttccatttttccca

SEQ ID NO: 13272 - DNA, 406 bp, Bos taurus
  Clone ID: 57-LIB188-009-Q1-E1-G2
accacgaggccagtaagcatccccttggcctcccttgtggctcagctagctggtaaagaatctgcctgcaatatgggagacctgggttgggaagatcccctggagaagggaatggctacccactccagtattctggcctggagaattccatggactgtatagtccatggggtcgcaaacagttggacacaactgagcaactttcactttcacttttggaaaccttcgaggggcattgctgaacagattctgtccagaacttaaggtggggaccagtttctgtcctggacaagaggccttgggtgttcacgacttgcagcctgcaagccccaagggctggtgaggggcatctggaagagggctctccgtgaccaggacagcacactgaaagggacctcccaagcaca

SEQ ID NO: 13273 - DNA, 394 bp, Bos taurus
  Clone ID: 57-LIB188-011-Q1-E1-G10
ggatagcccagcagcactactaacacgtcttccttcgtcttcacctaccctgaggctgactccttccccagctgtgcggctgcccaccgcaagggcagcagcagcaacgagccttcctctgactcgctcagctcacccacgctgctggccctgtgagcgggcagagaggggacgcagtgggcgtgcacgtggccactgcctgagttggcgcattacagagaggagaaacacgtcttccctcgagggttcccatagacctagggaggaccttatctgtgcgtgaaacacaccaggctgtgggcctcaacgacttgcaagcgagcatccccgtgtggactcaagtccttacctcttctggagatgtagcaaaacgcatggagtgtgtattgttccc

SEQ ID NO: 13274 - DNA, 390 bp, Bos taurus
  Clone ID: 57-LIB188-011-Q1-E1-G2
gccatgggcgcgggatacacctctcggcccttacgaggaccagagaggaggacagtgccacagcccttgggggagtccagggccagctggtcgaaggtgaggatcttgcccccggccttgaggatgcgactccgggcgcggctgctcactcgcaaagcacacaccttcagtttgggcacctcctggacacgaacatcatcggttatagtccccacgaccacagctgttttgccctcccggccaggaagcttcatcttccggatcatccgggaaagagagagcggtggcctgttggtgcggctcatgaacaatctcttgaggacaacctgattgaaggtggagttggttcgtctggccaggacctgccggggcgggcgctcgaacaagaga

SEQ ID NO: 13275 - DNA, 448 bp, Bos taurus
  Clone ID: 57-LIB188-012-Q1-E1-G2
gccataggcgcgggatacatcaagctgtcaacagcgatcaagcggaacgagaacatggctaaagggctgcagaaggccctgctgcagcagcagccggaagatgacagcaagcgcgcccctcggccccaggacctgatccggctctatgacatcattctgcagaatttggtggaattgctccagcttcctggcttagaggaggatagagccttccagaaagagataggccttaaaactctggtctacaaggcttacaggtgtttcttcatcgctcagtcctacgtgctggtgaagaagtggaatgaagcccttgtcctgtatgacagggtcctgaaatacgcagacgaagtgaattccgacgctggagccttcaagaacagcctcaaggacctgccggacgtgcaggagctcatcacacaagtgaggtcggagaagtgctccctgcagg

SEQ ID NO: 13276 - DNA, 415 bp, Bos taurus
  Clone ID: 57-LIB188-013-Q1-E1-G10
ggccgcgggatcctattctttaccggatttttctgagctttctaccactcaagcctcgcccccacccctgaactaggcggctgctgacccccaacaggcattcacccactaaaccccctagaagtcccactgctcaacacctctgtcctattggcttccggagtttctattacctgagcccatcatagtttaatagaaggggaccgaaagcatatattacaagccctatttatcaccatcacattaggagtctacttcacactactacaagcctcagaatactatgaagcaccttttactatctccgacggaatttacggctcaactttttttgtagccacaggcttccacggcctccacgtcatcattgggtccaccttcttaattgtctgcttcttccgccaattaaaatttc

SEQ ID NO: 13277 - DNA, 419 bp, Bos taurus
  Clone ID: 57-LIB188-013-Q1-E1-G2
acctcgttccaaacttaagatgatgccctgaatgcacggcggtgtttatattcatcgtgaggggtgtctgtgatgtttggagtttgaaaatggatttagacagtgctaagcggagtccactgggtttggttctgtgccgtttttgagcaagtcattcattcactggctttggttccgttgaagtcagcatcgcgagcgtccatttcctcctcagacccatctgcgttctcaataactctacgtcctccagaccttcttgtgggaacaaaagaggtctcgttccctcgcctgagcttgctcttgagcgctgtcacctcgcggcccatggcctcgttgctctccgtggcctcgtccagctcacgctgcagtttcctgcggttggcattgatacgctgggactcctcctccgcctcctccag

SEQ ID NO: 13278 - DNA, 417 bp, Bos taurus
  unsure (394): unsure at all n locations; Clone ID: 57-LIB188-014-Q1-E1-G2
gccaaggccgcgggatacagagacttgtcaccatcaagcagctgcatgaacaagccatgcagtttggtcagcttctgacacacttggataccacgcagcaaatgattgcttgttccctcaaggacaatgccaccctcttgactcaggtgcagacgacgatgtgtgaaaacctgtccacaattgaggggaactttgccaacattgatgaaaggatgaagaaactgggaaagtgagcacctttgggtgatggaggacaggggtaatccctacccctttgaactccattaataccttacacagagtttccccttaattgtaactcttgcatcccatttgacactgggggcaagggcttcttgcatgtggggcttacaccccctcctctgaagagtantggaagctggggatattaaatga

SEQ ID NO: 13279 - DNA, 418 bp, Bos taurus
  Clone ID: 57-LIB188-016-Q1-E1-G2
cgccatagccgcgggatgacccggaggtgcccaaatgtgagtgggagtatcctgaaggctgtgaacaagtagtcacaggcaggaaactcttgcagtgcctctcaaggccagaggaggtgaaattggccctggaagtgtacaagctgtccctggagattgaaatccttcagacaaataaactaaagaaagaagcatttctcttaagagagagggagaaaaatgtgacttgtgactttaatccagaatagatcacttcagttaatcacctttaccatctctttatgccatcaactgtggtaatagttatctagaaagaataatttgttaacatttagttatttgagattgtagaattgttgatcattttctgactcattgtttttgcttttctgtctacattgttcgagcggccgcccgg

SEQ ID NO: 13280 - DNA, 446 bp, Bos taurus
  unsure (208): unsure at all n locations; Clone ID: 57-LIB188-017-Q1-E1-G10
ccatggtagccggatacgtcttcaaaaattgcaattggtaaaatttcaatccctttccaataagtttgagttaagaacctttaacctggtacaaaacaattattacaaccaattggtcaaccaagggaccaagaaggtgaacaatggccccccttggtggatgcgggtagcactgaaaactggagaaagtggagacctcagtagaganatgtaaagactgatttgaattttaagttaatgtgaaatcttggcagagaacgttttaataaataaatgccttaagagtatttaaaagatgcttccatatttcaaaatataaaatgtgtgtttgacattgtgtctgggaaggaagggctggaacctggagcctttgggacctgctgttcccagccttcgcaagactgcttgattctcataagcccagacgttggcccaaaagcaaaatt

SEQ ID NO: 13281 - DNA, 432 bp, Bos taurus
  Clone ID: 57-LIB188-019-Q1-E1-G2
gccaagggcgcgggatactcccacatgcactacttacacatcttccttcgtcttcacataccctgatgctgactcattcccaagctgtgctgctgcacatcgcaagggcagcaccatcaacgagccttcctctgactcgcacagctcacccacgctgctggccctgtgagctggcatagagtgggacgcagtgtgcgtgcacgtgaccactgcctgacttgtgccattacaaacaggagaaatacatcttccctcaagggttcacatatatctacggaggagcttatctgtgcgtgatccacaccaagctgtcggcctcagagacttgcatgcgaacatccccgtgtggacacaagtccttacctcttctggagatgtagcaatacgcatggaatgtgtcctgttcccagtgacacatctgagagctggtac

SEQ ID NO: 13282 - DNA, 420 bp, Bos taurus
  Clone ID: 57-LIB188-020-Q1-E1-G2
acaaagccatctaacttaccttcttcatactgggtctggggaccctgctgccctggaatttcttcaggacagccactaagtatttcaaaaaccgcctggacatgtccaagaatatgtccttgggccctgctgaagtaagcaaggacatccaggcctcagccagccccctggcaccctcgccagagcggactcatctcagcaccatcttcaacaacgtcatgaccttatgtgccatggtgcccctgctgatcttcacctgcctcaactccttcctgcatcagaggatcccccagtctgtgcggatcctgggcggcctggtagccatcctgttggtgttcctgatcactgccatcctggtgaaggtgcccctacacgcgctgtccttcttcgtcatcaacatgctcaagatcatgctcatta

SEQ ID NO: 13283 - DNA, 163 bp, Bos taurus
  Clone ID: 57-LIB188-021-Q1-E1-G10
tggccgcgggataccaagagcaccggtggagccccaaccttcaatatcacggtcaccatgactgccaagacgctagtcctgctgatgggcaaagaaggtgtccacggcggtatgatcaacaagaaatgttatgaaatggcttctcacctgcggcgttcccagt

SEQ ID NO: 13284 - DNA, 422 bp, Bos taurus
  unsure (170): unsure at all n locations; Clone ID: 57-LIB188-022-Q1-E1-G2
ccatggacgccggatagtgaaggcatcaggttcactgcagcaattgtccctggatagtgccacctttgcatccccccaaaaatttgggcttgtgttgcaaacactcaaagagtataaactaaaccctaaagaggctgagcttccacgacatgaatctggctgactgtcanagtgaggtgctctttttgctacagaatctgactcttcaagagattaccttctccttctgccgtctgtttgagaagcgcccagcccaatttctgcccgagatggttgctgctatgaagggcaactccacattgaagggcctccggctgccaaggaaccgcctggggaatgctggcctactggccctggcagatgttttctcggaagattcatcctcctctctctgtcagctggatatcagttccaactgcatc

SEQ ID NO: 13285 - DNA, 444 bp, Bos taurus
  unsure (328): unsure at all n locations; Clone ID: 57-LIB188-024-Q1-E1-G10
ccatagccgccggatacatccttgatgaatgagactttcagggtctcaatctgaagatggcacccccagttttcatccctaggccagaaacggaggagctggttgaatgggtgctggaggaagtgacccaaggaccccgtgtggtgggagctgaaggcggccccctcatcttggaggtgggctgtggatcaggagccatctccctcagcctgctgagcaggcttccccagagccgagtcactgctgtggataagggagaagccgccatctgcctgacccatgagaatgctcagaggcttcggttgcaggacaggattcagatcgttcncttcgatgtgaccttagtggagagctgggcacaccttctaccctggggccctgtggacctggtcgtcagcaaccctccctacgtcttccaccgggacatggagaacctggctcctg

SEQ ID NO: 13286 - DNA, 418 bp, Bos taurus
  Clone ID: 57-LIB188-024-Q1-E1-G2
ctccagactgagtcatactatctctgtgatggtcagcatgctgtaggccctgaaagttatgggtgaggactgcacagtctccacctggccttcagaaatgccagacactatccgctttccatcacgaaaccaggacaaggagatctgtttggggctgaagtccgtggcctggcagatgaggctggacttgctattgccgtcaccagagaggctgttgcgaggcgggacaaagacactcacgatgggggacagcacttctgcctttggagtgaccaccctcacggtgccgacggtctttcctcccttggggtgctggacttcgcacaccaggtagtcatccggcccttgaaaggcgcttgaggaaggcaggaccacctgagatgaagccgaccacaagccgtccctcaggactgccggg

SEQ ID NO: 13287 - DNA, 316 bp, Bos taurus
  Clone ID: 57-LIB188-025-Q1-E1-G2
gggacacatcgccaaagccaccctcaacgggatctcgaccccgggatgagcatactcgtcgatgatcaggtaccatcggcaggattgctagccaaacagcttgagctgcataaagttgtctatgccaggtatcacctggtccatgctgataagcttggaggtcaagtccacaatgccatcgaactttggggccatgaaaacatgacaaggcagcttggatacctcgcagaccgtgagcctctgcactgtgacccgactgttgctgaagcaggaaagctcacagtgtaccatgacagccgtcgccggcaagttcaca

SEQ ID NO: 13288 - DNA, 421 bp, Bos taurus
  Clone ID: 57-LIB188-026-Q1-E1-G2
tggccgcggcatacgaggacagaaccttagggctctgcccagaaggggttgccatcctcggcctgcatgaagtagtaaacaaagagcaggaaggcagcaaagaccaggaacagcagcacctggccccagagtgggacctggcgatcctggcccaggccggcagccccaggggcctgcttttcaggccggatggctctgcgggtgagccacgaaggggccgaagatgaagatgaggacacactcgaggtggaggaggatgtgggataataggacaggcccagggagcttctggagatgttggaaatagggcggtagtgtgcgatgttctggtaggcactgtcctggccatacaggaggcgttcccgatccttgccttcctcttccaaagagaaaagattgtcatcacggacctggcggtgaa

SEQ ID NO: 13289 - DNA, 239 bp, Bos taurus
  Clone ID: 57-LIB188-028-Q1-E1-G10
gcccgagctcacatgctccaagccgccggagacctgcaagggcggcagctcgaactgcaaaatctcagcattggctctactgaaaatggtgatgcatgccagatcaggagacaacctggaagtgatgggcttgatgctgggcaaggtggacggtgagaccatgatcattatggacagctttgctttgccagtagagggcactgaaacgcgagtgaacgctcaggctgctgcatatgagt

SEQ ID NO: 13290 - DNA, 381 bp, Bos taurus
  Clone ID: 57-LIB188-028-Q1-E1-G2
cgccatgagcgcgggatacctctcattagagttgggcacacacttgtccaggccctggtcatcgccagcacacaaggcacagagtctggatttcgggtcagccccaggggcacagctctgactaaagaattcatcaaatgcgcaggagcctgtctggttgacgatcaggcccatggggatgttccagcctgcagtcctgtccacggcggtgtggcacgacttcttgtctttcagagaattccatgtgagcccctcatttgctttcttgacaactgccacggcaaggtacaagctttttttttttttttttttttttttttccttgggaaacagctttatttacaaaacaggtctaaaataagaacctgaaaacgacaaggc

SEQ ID NO: 13291 - DNA, 473 bp, Bos taurus
  Clone ID: 57-LIB2809-003-Q1-E1-G10
ccatggccacgggatacacgctggctccctccagggggctggggccaccttctgagtgaggcactttggaacctgcctttgcttcttgtgcttcccagtgaaggctaggcaccccctgcttctgcaagcctcgcactgtccgctgggagcactgactcagggtaggcagcttatccagtaagccgggggcatccagcatgctctctggttctgacccagacagaggagactaaaaacaaatcctcttttgctccatggctggctctggcacaacatgagcattcggcttggccgtgcctcatgagtgcgaatgcctgtgcccaggatgtttctagcaggctttgccagccttgtctggagtcatcagtgtggtaaggagcacaaggatatatatggagactctggaagccaatttaaagtggcagcttgctcaactttgtaaagagagacagtggttcagtgaccctgaccat

SEQ ID NO: 13292 - DNA, 408 bp, Bos taurus
  Clone ID: 57-LIB2809-004-Q1-E1-G2
ccatgaccgccggatacacagaagcaaaacgaggtacccacggggcagaggagttccaggaacagaaagaggacagaagcagcaaagacagcaggtgttcacaacttcgcacagagccactgatccagcttctcagaacagagtgctttatgggccaaccactagttaattcctacgttatccagaatcttcttgacacacataatgtcatcagtaagatcatcatccaggaacttgtcacaggagatgttacagatgttgcttgagtgagggttctggtcgtctttgcaccaaattttattagttagctggaagagtccatattctgtgctgtcattgttttgtacaagctttttttttttaatgttttttttttttagaagaataaacagtcaattttatttggct

SEQ ID NO: 13293 - DNA, 471 bp, Bos taurus
  unsure (447): unsure at all n locations; Clone ID: 57-LIB2809-005-Q1-E1-G10
gccatggccaccggatacagtactctttaaaattttcatttttaaattgaaagccaacaactctgcctttatgatgctaagctcatgttcttatttcttctcctatcttctttctcttctgttcccattatccttccctttgttttgtccctgtcaccttcctttctccttctcctcattgccccccaggcaagcaggtggtcagtcattggtgggtttccagcttccaaagcctagacaaccctgctgtagtctcaaactagtggtctttgccccggctgaccctttccttgagctgtctgagctttaaggtggatggctcaagctagagatatgacagaatcttctgggaagggccttgatgatcttcagcccagacttttgctaaatgaaatggaaaaataactttattttggcaccaaactgaaaaaacgggtcaattgtcangggagagagtcagcatgcatggtg

SEQ ID NO: 13294 - DNA, 428 bp, Bos taurus
  Clone ID: 57-LIB2809-005-Q1-E1-G2
ataaaaagcgccatcagggacatcgagcaagggtcaaaagtccagagcgccattcatgcacccctggagattagtccttacatgtccattgtcactacagggcccagggctcagagatgagttagcttcaagggggtccagcttgctgcttcttcccagtcttgggttcaagatcttgacaaccatgaaacttctcatccttacctgtcttgtggctgttgctcttgccaagcctaaacatcctatcaagcaccaaggactccctcaagaagtcctcaatgaaaatttactcacgttttttgtggcaccttttccagaactgtttggaaaggagaaggtcaatgaactgagcaaggatattgggagtgaatcaactgaggattaagccatggaaaatatttagcaaatggaagctgaaagcatttcgt

SEQ ID NO: 13295 - DNA, 406 bp, Bos taurus
  Clone ID: 57-LIB2809-006-Q1-E1-G2
gccatgggtacgggatacgaacgatgggtgtggagagattcgtggctcagtatgggagaggatggtgtttaaagctaattaaaggtgtggttgagcagttttaaaccatatgtgggtgagacgtggccattggccatgagacaatggccaatgaagtggtgatatcactgaaagatgatgcctgaaaatgcctctaaagtggagagattctagataaaagaaagaagacaaccagcaacttgtggaatcaacaaattgaggttggaaagagccctttgcattttgtttaaaattctttcctctttcattctatctgacctcctcaccttctttactccccttgccaattgctcagatccaccctgtatgaatgacttagaaaatctgagacatgggccctaaagct

SEQ ID NO: 13296 - DNA, 390 bp, Bos taurus
  Clone ID: 57-LIB2809-007-Q1-E1-G10
ggcccgggatactgaagaatgaagccattcctcccactgcagaaaaataggtcatctgacggatggggaatctgcacacttcagtgccattttaaaggcagcaactaaacagcccttctttggctgtttttagacatcttggtgggacccacagagaacgaggggttgaaattaaaaggtgggcttcatacagaatcacttactaagcaaagaccctggtgggagacaaaaaaactagtctgggtggagtgtgagccgcagtgaggaggggatcaaagaagggtcctggtttgttagtcctcaatgagaccaaaggtcgagcagacagacaagccacgtggacgtagggaaggaccaagacaagacacatctctggaattagggctgaac

SEQ ID NO: 13297 - DNA, 376 bp, Bos taurus
  Clone ID: 57-LIB2809-010-Q1-E1-G2
acagcagaaaggcatgaatgggcatatctctctggggatagggcactgctttctggggaacaggcaggactttggactgagaaagggacagcacggactgaggaggaaacatgacagttggaggaagaggctggtgaggctggtgcatccaagactggagcagaggcagaggaaggtgcagattttcaacatcagtgagagtcaggctctggctttcagtaaagggctcaactggatatttagggaagggcatttctttgtgcttaggagccatagcctccttcactttggagactcccattacttcaggctgaaggaaaggcggcaccaccacaggggtttgagtaagaggagggatgttttgtgggacgctgtt

SEQ ID NO: 13298 - DNA, 318 bp, Bos taurus
  Clone ID: 57-LIB2809-011-Q1-E1-G2
agaactaaagttacgtgtagcctatcgcgctggggatatggtactgctttcaggggaacaggcatgtctttggtctgagcacgggacaacaaggactgatgaggacccatgacagttggaggaagacgcaggtaacgctggtgcatccaacactggaccagaggcataggaaggtgcacattttcaacatcagtgatagtcaggctctggctttcagtacccggctcaactggatatttagggaagggcatttctttgtgcttaggagccataccctccttcactttggagactcccattacttcaggctgaacgaaa

SEQ ID NO: 13299 - DNA, 99 bp, Bos taurus
  Clone ID: 57-LIB2809-012-Q1-E1-G2
ggctctgagaacactgaaaagactactatgccactgtggtgaagagtcaagtgaattcggagggactccacagttatggtccgtgatggttctgaaaat

SEQ ID NO: 13300 - DNA, 442 bp, Bos taurus
  Clone ID: 57-LIB2809-013-Q1-E1-G10
tggcaaactcaaaggggaagaagagtttccatccatgtcagagtccaggaatcctgatgaagaaggtttgtttactgtgagagcttcagtgatcatcagggacagctctatgaagaatgtgtcctgctgcatccggaacctccttcttggccaggagaaagaagtagaggtttccataccagcctccttcttcccaaggctgactccctggatggtggctgtggctgtcatcttggtggtcctaggacttctcacaattgggtccatattttttacctggagactatacaaggaaagatccagacagaggaggaatgaattcagctctaaagagaaactcctggaagagctcaaatggaaaagggctacattgcatgcagtggatgtgactctggattcagatactgcccaaccccacctctttctgtacgaagattcaaaa

SEQ ID NO: 13301 - DNA, 396 bp, Bos taurus
  Clone ID: 57-LIB2809-013-Q1-E1-G2
acatatcttaccgctcctcattcttggagctgcactgaactgccatccacttctgctccgaactgaacgggatctctttctttcggatgtatgaatctttaatatcgcctaagtccatcttcattgccagggccaccaaggcgccctctgttggctgccccatcacggtgttttttctgatgatggcgttgttggcaacacagcctgcctccactaacttccccaccgagacgttggaaaactgcttaatgacttccttggagggtaaaaggcagacagtcccattgccgttgtagccaactccgctgacctcggcatggagcccatcagatgttacgagttgggtgacagtcatttcgtttgcagtcagagtccccgtcttatcggaacagatga

SEQ ID NO: 13302 - DNA, 426 bp, Bos taurus
  Clone ID: 57-LIB2809-014-Q1-E1-G2
agtattcattaaaattttctttttaaattgaaagccaacaactctgcctttatgatgctaagctcatgttcttatttcttctcctatcttctttctcttctgttcccattatccttccctttgttttgtccctgtcaccttcctttctccttctcctcattgccccccaggcaagcaggtggtcagtcattggtgggtttccagcttccaaagcctagacaaccctgctgtagtctcaaactagtggtctttgccccggctgaccctttccttgagctgtctgagctttaaggtggatggctcaagctagagatatgacagaatcttctgggaagggccttgatgatcttcagcccagacttttgctaaatgaaatggaaaaataactttatttttggcacaaactgaaaaaacaggtcaattgtc

SEQ ID NO: 13303 - DNA, 275 bp, Bos taurus
  Clone ID: 57-LIB2809-015-Q1-E1-G2
cctttttcttgattgcatcatcgttctttttacaccacacccttattcataagagtggaacatatccgttcagccatagcataatgacagtatcaaaccgagctgtcgatattactctatcaaatttcttcaggtgcggatttatgttgacaaataacaacttttttgtaaagctacacctgactttatgtttatttttccaagcgaatcgattacactcattcaacgagactatttgagacctttcacagtgaggagcagcagcctgcccgcag

SEQ ID NO: 13304 - DNA, 405 bp, Bos taurus
  Clone ID: 57-LIB2809-016-Q1-E1-G10
gccatgtacccgggatagactatactttaaaatattctttttaaattgaaagccaacaactctgcctttatgatgctaagctcatgttcttatttcttctcctatcttctttctcttctgttcccattatccttccctttgttttgtccctgtcaccttcctttctccttctcctcattgccccccaggcaagcaggtggtcagtcattggtgggtttccagcttccaaagcctagacaaccctgctgtagtctcaaactagtggtctttgccccggctgaccctttccttgaactgtctgagctttaaggtggatggctcaagctagagatatgacagaatcttctgggaagggccttgatgatcttcagcccagacttttgctaaatgaaatggaaaaataac

SEQ ID NO: 13305 - DNA, 375 bp, Bos taurus
  Clone ID: 57-LIB2809-017-Q1-E1-G10
ggataggccaatggaaattgtatccaatagtgctgaggaacgacttcacagtatgaaagagggaatccatgcccaacagaaagaacctatgataggagtgaatcaggaactggcctacttctaccctgagcttttcagacaattctaccagctggatgcctatccatctggtgcctggtattacgttccactaggcacacaatacactgatgccccatcattctctgacatccctaatcccattggctctgagaacagtgaaaagactactatgccactgtggtgaagagtcaagtgaattctgagggactccacagttatggtctttgatggttctgaaaattccatgctctacatgtcttttcatctatcatg

SEQ ID NO: 13306 - DNA, 360 bp, Bos taurus
  Clone ID: 57-LIB2809-019-Q1-E1-G2
acaagctattttatttttttttttttttttttttttttaccttaaaatgtaatttattgaaaagaagaaagacaaaatctcagttaatgcacacaattatttgatatgatggcacttacaggagaagtgattcaaaggcttttaaaacattttccatacagaaatttaatgaagactttaattccctttgactcagtggcctttataccagcatgatactactggaatttaggtaacaagctgttaggacaatttcacttaaggatgttacactatctaaaatacagtagagaactcaagaagaaagagtgccttcaatttgagattgccctattctaaaacagcagttgaagcctttgg

SEQ ID NO: 13307 - DNA, 297 bp, Bos taurus
  unsure (27): unsure at all n locations; Clone ID: 57-LIB2809-025-Q1-E1-G10
tggaacaaaccaaactgctgcatgaancagaagaaaaacacaccgttactctctcaccatctttattcaacccagaggagttcatgcccctggatcctacccaggaacccatcttccctccagagttgctgaggctgaaagacgttccaccgaagcagctgcgttttgaaggggagcgtgtgacctggatccaagcctccaccttgaaggagttgctggacctcaaagctcagcatcccgaggccaagctggtggtggggaacacagagatcggcattgagatgaagtttaagaatc

SEQ ID NO: 13308 - DNA, 258 bp, Bos taurus
  Clone ID: 57-LIB2809-025-Q1-E1-G2
caggatgtggccaactttatgaactggatggtggattaattttactatcccctgtgcaatgtgcatctcttgggatataaccttggcgcccatgctgctggtagtgcaggaagtcttgccattcacaacgtcacaatgattacctggttaaatctagctgtcacctaacttcgaatatgcagcaattccaagtcgcctttctccttatgatgcgtattttgtacacgttttacacacattcaccatcgggtcaccacg

SEQ ID NO: 13309 - DNA, 370 bp, Bos taurus
  Clone ID: 57-LIB2809-027-Q1-E1-G10
tgggcatatctccccggggaaaaggcactgccttctggggaacaagcaagactttggactgaaaaaaggacaacaccgactgaagaagaaacatgacagtttgacgaaaaaggcggttaggctggtgcatccaagactggagcagaggcagaggaacgtgcagattttcaacatcagtgagagtcaggctctggctttcagtaaagggctcaactggatatttagggaagggcatttctttgtgcttaggagccatagcctccttcactttggagactcccattacttcaagctgaatgaaaggcggcaccaccacacgggtttgagtaagacgaaggatgttttgtcggaggctgttagggatgggccc

SEQ ID NO: 13310 - DNA, 414 bp, Bos taurus
  Clone ID: 57-LIB2809-030-Q1-E1-G2
gcatgccccaagccgccaagggcccgggatactcactcaatggcacagcccacgttgggcccggtgtgcaggtcctgggccttcgacttcaagtgcaatgtataggaacaccaatctgagccttgtattctctttaaatatttattattatttttttaaacgtgtgagatgctaaagagggttctccatttcagtgctgcatggaggcaaaactcagcaataatttcttttcagctgtgaagttactttgttgtgccctcccgccgagccccagtcctttgaaatactcccagcttgggggtttagtaaacttgtaatttttacttacaaattcaccctttctgtattttgcaatttaaaacattttggttgttttgaatcctgtgaatgtggcttgatggtaagattcctctg

SEQ ID NO: 13311 - DNA, 251 bp, Bos taurus
  Clone ID: 57-LIB2809-031-Q1-E1-G2
gggatcctccttagccatggcggccagcgacatctccctgctggacgcccagagtgcccccctgagagtgtatgtggaggagctgaagcccacccctgagggcgacctggagatcctgctgcagaaatgggagaacggtgagtgtgctcagaagaagatcattgcagaaaaaaccaagatccctgcggtgttcaagatcgatgccttgaacgagaacaaagtccttgtgctggacaccgactacaaaaagt

SEQ ID NO: 13312 - DNA, 373 bp, Bos taurus
  unsure (237): unsure at all n locations; Clone ID: 57-LIB2809-032-Q1-E1-G10
cgccataagcgcgggatacccaggcatcccatggtctcggcaacgctgtaagttgatagcagccaggtcaaagccgtggatcttgtgagtgggctggaaaagcttgttgcgcagctcactcgtcaccattttatcctgattcatcagtttggacttcttggccagcagaccccgcaccagagggtcaattccaccgtctttgattatcctccaggtgttgaagaagagggtgtgtanggggagctctgcttccggaccccatggctggtaattctcatccaggcgggacacagtggagggaacctccatgtggccaaagcggaaagcaaatgtgaagacattggaaattcggggatccacaaagttattatag

SEQ ID NO: 13313 - DNA, 376 bp, Bos taurus
  unsure (10): unsure at all n locations; Clone ID: 57-LIB2809-032-Q1-E1-G2
cgcatgctcnctaccgccaagggcccgggatacaaagaaagggacctgacccacttcaaccagaagcttgaggggttcagcgtgcccaggtgctgggatgagtgcctgaagagctctgagtattacgctcggaagagtgaggtcgacaagttcaacaaggagaattgttggaaaaagagaggattgtgcataattcctaccaaatttggaataagcttcacagttccttttctaaatcaggcaggagccctgatccacgtatacacagatggccccgtgctggtgagccacgggggcaaagagatgggccaaggccttcaaaccaagatggtgcaggtggccagcaaagctctgaaaatcccaatctctaaaatct

SEQ ID NO: 13314 - DNA, 359 bp, Bos taurus
  Clone ID: 57-LIB3057-001-Q1-K1-G2
gagcgctgctttcactttcccttctccgtgcccactcctcgctcctcgtgcggcgtaggcccctaccccggccatggccacgctcagggtcctgcccgaagcccaagccaaggtggatgtgttccgtgaagacctatgtactaagacagagaacctgctcgggagctattttcccaagaagatttctgagttggatgcatttttaaaggagccagatctcaatgaagccaacctgagcaatctgaaggccccattggacatcccagtgcctgatccagtcaaggagaaagagaaggaggagcggaggaaacagcatgagaaggaagacaaggatgaaaagaagaaaggggaagatgaag

SEQ ID NO: 13315 - DNA, 411 bp, Bos taurus
  Clone ID: 57-LIB3057-002-Q1-K1-G2
tagatcgcgagcggccgcccttttttttttttttttttttttgacatcgctacagagtgtgtttttatttaagatgaaacccattagagccaagcatgcattacaaagctataaagctcagagaagtttgccagggaatggatcattaagaaccatctcagaaatggaaaggatgaatgtgggcttagcagttgttgttgtagatgattctgcaattcaggagcttaaggtaagtgtcaatcttgcttgaatccctgcgcaggcagtggagcaggttataaaaagcggaataacgtgcatcttcatccttagtttgcagggacgggagtcctgaccacacagggtagggctcagtctctttggctccaggaattacctggccaaatatcatcttcatgccttccagaagtc

SEQ ID NO: 13316 - DNA, 253 bp, Bos taurus
  Clone ID: 57-LIB3057-003-Q1-K1-G2
cgttattccgctttttataacctgctccactgcctgcgcagggattcaagcaagattgacacttaccttaagctcctgaattgcagaatcatctacaacaacaactgctaagcccacattcatcctatccatttctgagatggttcttaatgatccattccctggcaaacttctctgagctttatagctttgtaatgcatgcttggctctaatgggtttcatcttaaataaaaacagactctgtagcgatgtc

SEQ ID NO: 13317 - DNA, 375 bp, Bos taurus
  Clone ID: 57-LIB3057-004-Q1-K1-G10
atggtttagcaccaggcgccccacgaacgtgcggtgcgtgacgggcgagggggcgggcgtctttccggccgcgccccgtgtcccgggacgaagggctctccgcaccggaccccggtcccgacgcgcggcgggggcgcgccgcgccgcgccccgggggacgcgggcgacggcccgccggcggggacggcgggggaccggctatccgaggccaaccgaggctcccgcggcgctgccgtatcgttccgcctgggcgggattctgacttagaggcgttcagtcataatcccacagatggtagcttcgccccattggctcctcagccaagcacatacaccaaatgtctgaacctgcggttcctctcgtactgagcaggat

SEQ ID NO: 13318 - DNA, 430 bp, Bos taurus
  Clone ID: 57-LIB3057-004-Q1-K1-G2
acccacgcgtccgggagtagacccctactcacaaaaccagtattcctcaagctgttcctggactccattcagggtgggtgtaaaaccttactccccaatggaaatttcctgtgtgaacccctcccgttcgataggcaaaaccaaatccacgcaggcatcttaaagcgctcttttgtcttaacctgaacacccggagcgtcttcatggtgacgtgtgttatctccagtgcacgtaagttgtggtacttttcctgtaaaactactgcatggcccaccttcatcagtgaagtgtgcctcatggagaccccctcgctctcttaaggtgaccttttctttaaccatgtactgttcacatggtgcaatctttatccccaatgatgtcattaatgtcttttaaagcccagaatcccattttactgatattcattttc

SEQ ID NO: 13319 - DNA, 437 bp, Bos taurus
  Clone ID: 57-LIB3057-005-Q1-K1-G2
cgtgatggtttttgttccaaaacagtggaatatcatcgtcttgaccagaatgttaatgaatcagggcctgctctgaagattaccaatgattatatattttaaagcactgtgatttgcatttgcttattatgtaattctatttgcttgactttctatatgatattgtccagatgtttgccattggcaattcatacttaaatgatatgtgagcctctctttattttgcttcggtgctttggaaattaagtattacaaacaatgagtctataattttttatctacatttatagaggtaaattcaatcaggtgtccaaaatgtggagctaagcattacctgttagtcatttattgttctaaatttctttattgtacttcttctggaactgttagtcatgctaatttataaaaattccagacttataataaattctaacaca

SEQ ID NO: 13320 - DNA, 367 bp, Bos taurus
  Clone ID: 57-LIB3057-006-Q1-K1-G10
gaataacatttagaataacctgttgcttaaccagatcctgaaccgcaaccagaaccagagcacggacctttatcttaattccattaagtatagtcttatcccttcatgtaatatacttctccttatgatctaatgaacatttcaactgccacgtcttccttcaaaacctttattacctatcagtaattgagttccactacatccatgacctatactaggaaatgttcaacgaatttcataaacagtatgcccattgcataggattcattaccattctcctcaacagctgccatacatactatcttcctacccctcaacataaagaacaatcccatcatacccaacattaactccttatgagctttat

SEQ ID NO: 13321 - DNA, 409 bp, Bos taurus
  unsure (297): unsure at all n locations; Clone ID: 57-LIB3057-006-Q1-K1-G2
cggacgcgtgggcgcgcgaagcctgttgctcgcctctccgggccgccgcttcccgccaggtgccccggggccggcggccggagggggtgaggcgcgccggcagccctccgccctctccctctccccgcgcacaagtggacccgggcttctcctagagctccgacgccagagagccttccagtgcgccccggaccgcgcgccgagacccccccgtccccgggcgccgagcggcgatgaactcgaccttcctgaaccacagcggcctggagacagcgggtggcttgggcggcggccgcngcggggctgcgctggggaaccgcaggcacggcctgggcacgtggctgggctgctggccctggggtgcgccgctgtccgccaacgacggggtcccccgcgggctggcaccgga

SEQ ID NO: 13322 - DNA, 433 bp, Bos taurus
  Clone ID: 57-LIB3057-007-Q1-K1-G2
attaactcaaagcaagcaacagcaaatgccaccacctccgccccctccacccccaccaggtgcagcaactggtggcaaagggaagtctgggggaaggttccgactttatttttgtgcagacagaggggccacaaaagaacgcaaagaagccaaagaagggaaagacacagagcccccagaaggtgcagctcggggtccccacagagccagagcttttgatgaagacgaggatgatccatatgtgccaatgaggccaggcgtggctgctcctctcgcaagctccagtgactacatgcccatggctcctcaaaatgtctctgtgtccaaaaagcgccactctcgatcaccttttgaagattctagagggtacatgatgatgtttcccagagtgagcccaccacctgtgccaagtcctccaaaagaacctgatcct

SEQ ID NO: 13323 - DNA, 423 bp, Bos taurus
  Clone ID: 57-LIB3057-008-Q1-K1-G2
gatcaaattgccaacatctgttggattatagaaaaagcaagggaattccagaaaaacatgtacatctacttcatgaactaccttatagcctttgactgtgtggatcacaacaaactggaaaattctgaaagggatgggaataccagaccacctgatctgcctcctgagaaatctgtatgcaggtcaagaagaaacagaactggacatggaaaaatggactggttcaaaattgggaaaggtttatgtcaaggctgcatattgtcaccctgcttatttaacttatatgcagagtacatcatgtgaaatgctgagctggatgaatcacaaactgaaattaggattgcaaggagaaatatcgacagtctcagatatgcagacgataccattctaatggcagaaagtgaagaggaactaaagatcctc

SEQ ID NO: 13324 - DNA, 431 bp, Bos taurus
  Clone ID: 57-LIB3057-012-Q1-K1-G2
gtgggctcctgagaggcgggatagaagagcggaggctgtgtcccacagacactagcaggatgaatatgtttgatcggaagatcaactttgatgcactctttaaattttcccacataaccccctcgacacagcagcacctgaagaaggtttatgccagttttgccctctgtatgtttgtggcggctgcgggggcctatatccatgtggtcacccatttcattcaggctggcctgctctctgccttgggctctttggggttgatgatttggctgatggcaacacctcacagccatgaaactgagcaaaaaagactgggacttctggctggatttgctttccttacaggagttggcctgggccctgctctggacttgtgcattgccatcaaccccagcatccttcccactgccttcatgggcacagcaatgatc

SEQ ID NO: 13325 - DNA, 394 bp, Bos taurus
  unsure (56),(61): unsure at all n locations; Clone ID: 57-LIB3057-014-Q1-K1-G10
agcggctgcaacgccgagcggaggaggcaggaaacctgtaggcaagcaggagctgngtggngacgatggccgggatcaccaccatcgaggcggtgaagcgcaagatccaggttctgcagcagcaggccgatgatgcagaggagagggccgagcgccttcagcgggaagtggagggagaaagacgggcccgagaacaggctgaggctgaggtggcctccttgaaccgtaggatccagctggttgaagaggagctggaccgagctcaagagcgcctggccactgccctgcaaaagctggaggaagctgagaaagctgctgatgagagtgagagaggtatgaaggttattgaaaaccgagccttaaaagatgaagaataaatggaacttcaggaaat

SEQ ID NO: 13326 - DNA, 387 bp, Bos taurus
  unsure (337): unsure at all n locations; Clone ID: 57-LIB3057-014-Q1-K1-G2
gtacccagaattcccctggaagagcgtccaggctgaaatcttccaggccttcacggaggtgttccaggtggcgtgtgccaggccgcccccgctgggcctctgcgactacccctcatcccgggccgtgtacgcggttgacctcatgttgaagtgggacagtcgtcccgatggggagcgggtgatgcagccgcagatcctggaggtgaacttcaacccggactgtgagcgggcctgcaggtaccacccgagcttcttcaacgacgtcttcagcaccttgttcctggacgagcccgacggctgccctgtcacccggctcctctaggcaccgctggccctnctgcgagtgcttgtgggcagattccagcctcagttctcggagctgcttct

SEQ ID NO: 13327 - DNA, 348 bp, Bos taurus
  Clone ID: 57-LIB3057-015-Q1-K1-G10
ggaaaccacccgttagtgctgccggcgtctctgtcgcctcatggcggccatcgtagtgcacctgtgctgcacatggtcttgtttggcctgctataatgttatatagaccctatatgctattattatatttaccacattttgaacaagattctcattcttttgttcattctttaaaacttaaatttttaacatattaatataagtttattactatctttataacactatttttattttacttgataatagtgttttactaattctttttctatattcatttttcaatttttaataatccatttatcggtgggctttttttatatatttaatattttttactattttttt

SEQ ID NO: 13328 - DNA, 315 bp, Bos taurus
  Clone ID: 57-LIB3057-017-Q1-K1-G10
tttccactcgtccggttcaggaagatcagcgtgacctgatttttaaagagcgagaggaagacctgaggcgtttggctggcccgctggagtgtgcttgttttcgaacatccatttgggatgaaacgctctacaaagcctggtccagtattgtctatcagctgattccaaatctccagcagctggagatgaatctcaggaattttgcccagattattgaggccgatgaagttctgctgttcgagagagccacgttcttggtcatctcccattaccagtgcaaagagcagcgtgatgtccaccgattcgagaagatca

SEQ ID NO: 13329 - DNA, 411 bp, Bos taurus
  Clone ID: 57-LIB3057-018-Q1-K1-G10
cggacgcgtggggtactgccaatgctcgaatgcccgagaaggtaacctggatgaggagggggagaattctgcgccggctgcttagacgataccgtgaatctaagaagattgaccgccacatgtatcacagcctgtacctgaaggtgaagggtaacgtgttcaaaaacaagcggatcctcatggaacatatccacaagctgaaggcagacaaggctcgcaagaagcttctggcggaccaggctgaggcccgcaggtctaagaccaaggaagcccgcaagcgccgtgaagagcggctccaggccaagaaagaggaaatcatcaagactctgtccaaggaggaagagaccaagaaataaagttctccccctcttctctgtacatagtggcctcggcaattgcatagatcactca

SEQ ID NO: 13330 - DNA, 441 bp, Bos taurus
  Clone ID: 57-LIB3057-018-Q1-K1-G2
gttcctgtatagtattatttaaatcataattactctacttgcagatcataattatgatcggcaagtatagtaattttgcaagttttaattgctagctgcatctaaacactactagttactagaattattttacacgcgagagttgctacagtatctgactcatttattgcctgtttttataaattaaaattttgttatcacagccatatccatttatttacatacattctgtgaatattatttacagtactttttcattatgttagtttttatgactcgattttatgctctttctttctttaattttagaggtgtttttcttataattttttattttttttttttttttctttttttatttttattttttttttatttttttttaattttttttatttttttttttttttaatttttttattttatttttttttttttttt

SEQ ID NO: 13331 - DNA, 257 bp, Bos taurus
  Clone ID: 57-LIB3057-019-Q1-K1-G2
cggacgcgtggggcggtggctgcgactggtccagtgttcgcgcctaggtctacgggtggactgtgatccgagcctggtacctacctagtcctcaccgtgtctgagtggacggcgtccgacgcgatgactctgaacggcggcggcagcggagccggcgggaaccgcggcgggggccgggaacgcgatcgccgtcggggcagcacaccttggggccccgcgctcccgctgcaccgccggagcatgccggtggacgagcg

SEQ ID NO: 13332 - DNA, 420 bp, Bos taurus
  Clone ID: 57-LIB3057-021-Q1-K1-G10
cgactcagggtcctgtggacagctcaccagctatgatggctgcaggcccccggacctccctgctcctggctttcgccctgctctgcctgccctggactcaggtggtgggcgccttcccagccatgtccttgtccggcctgtttgccaacgctgtgctccgggctcagcacctgcatcagctggctgctgacaccttcaaagagtttgagcgcacctacatcccggagggacagagatactccatccagaacacccaggttgccttctgcttctctgaaaccatcccggcccccacgggcaagaatgaggcccagcagaaatcagacttggagctgcttcgcatctcactgctcctcatccagtcgtggcttgggcccctgcagttcctcagcagagtcttcaccaacagcttggtgtttg

SEQ ID NO: 13333 - DNA, 312 bp, Bos taurus
  Clone ID: 57-LIB3057-022-Q1-K1-G10
agctttcttataggcttttgatgttgatctctagttttgtatccataattagcaaatggattaatagaaactatgttttcttggtgttattaaccattaatgtgtatatattattttcaatgtaaccaacgaaaaacaaaatcttttcttttcaagtttgtatattgaaatactgaaaaacaccttgtctacattctttgtctgattgtacgattacattgtccttattattcttaaactttacattttctgtaaattttttataaccgaattttaaaatattataattttaatatagtttggttttctaca

SEQ ID NO: 13334 - DNA, 387 bp, Bos taurus
  Clone ID: 57-LIB3057-024-Q1-K1-G10
acgcagcatcgagcctgatgaggctgacgctatggtgcagctgtccatgccgccatttgagccggggacaaatggtaaaatgttcaagacttgctgctgctggatgtcactcctctttcccttggaatcgaaactgcttgtggagtcatgactgtcctcatcaagcgcaatactaccattcctaccaagcagacgcatactttcaccacctactctgacaaccatcctggtgtgctcattcacgtttatgaaggtgagcgtgccatgaccaacgataactacctgcttggcaagtttgaactcacgggcataccttctgcccctccttggtgttcctcaaatctgaaatcactttctgatattgatgccaatggcattcctcaatgt

SEQ ID NO: 13335 - DNA, 444 bp, Bos taurus
  Clone ID: 57-LIB3057-024-Q1-K1-G2
tccgctaggataccccctgaagactttattgtcatgctcaaaactggagagaagccgtttgggccagatcaggaacttgagattcctgttgaacctgaagacatctcagaggttgacttagaccatccagatctgttccaaaataagatgctctccaagaatggctaccccaaagcacctggtcatgctgtggcagatgccctaccggaggggctcagagtggatgacattctaatatcttttattgatttatagttcttcttttccttatcctctatatttttcctattatttttttcttttggagggggttgcttttctttttctatttttttatcttttttttttttttttttttttttttattatattatttttttgttttttatatatttttttttttttttttttttatttttattttttttacttcttttttatttt

SEQ ID NO: 13336 - DNA, 286 bp, Bos taurus
  unsure (239)...(240),(255): unsure at all n locations; Clone ID: 57-LIB3057-025-Q1-K1-G2
ccacagccggaggcagaggcagcagggctgggcgggaggctggccgcgcgccttgcgccgttggggagcaagccggaagcttctgagccgaggaggaattcctagctagctgcagagctcgtgccttcggagccagtgtggtggccatagacaacaagatcgagcaggccatggatctagtgaagaatcatctgatgtatgctgtgagagaggaggtggagatcctgaaggagcagatnncggagctggtggagnagaaactccaacttgaaccggagaatactct

SEQ ID NO: 13337 - DNA, 270 bp, Bos taurus
  unsure (171): unsure at all n locations; Clone ID: 57-LIB3058-001-Q1-K1-G2
tcggaccaaaaaaataaccgttcgggacgcctaaccgagccggaaccgcattcaccatgaacagcaaaagtcaatattcaacgcagccaacttaccccgtgcagccttctgggaaccctgtgtaccctcagaccttgcatcttcctcaggctgcaccctatactgatgctncacctgcctactcagagctctatcgtccaagctttgtgcacccaggggctgtcaccgttcccaccatgtcagctgcatttcctggcgcctcactgtatc

SEQ ID NO: 13338 - DNA, 80 bp, Bos taurus
  Clone ID: 57-LIB3058-002-Q1-K1-G10
gaacaatgtatgccagggaagtcggcaaaacggatccgtaacttctggaaaaggattgggtctgagggttgggctcgggg

SEQ ID NO: 13339 - DNA, 239 bp, Bos taurus
  Clone ID: 57-LIB3058-004-Q1-K1-G10
cggacgcgtgggcggacgcgtggggttctagatcgcgagcggccgcccttttttttttttttttttttttttttttttttttttttttttttttttttttttttttttttttttttttttttttttttttttttttttttttttaaaaaaataattttttttcaggtactgtgtcctctttctgggtgccaggctgccttccacagatgcacagtatcagctgttctgtgtacatcttt

SEQ ID NO: 13340 - DNA, 448 bp, Bos taurus
  unsure (393): unsure at all n locations; Clone ID: 57-LIB3058-004-Q1-K1-G2
tgtcatttgctgcaacaatgaaaatcttactttgactattaatgcctattcattcttctaatacatggagaaaatgaatagcatcggtactagacaggaaatacaattcagctgcagaattttctacatgtctctgacttacagcttgctaattaaagtgctattattagtttattgtttgacttacttagaccttagaaaacaactgaggtttttttgcatgatgagagaattgtgtgtaaccagtgatatgatagttcctgaatgtataaacagaattctgaacactttttaatttaaaagcttaaaatagttcctgctttaaggaaatatgataatgtatactatgacaaatgttctttattcttctaacacaataagatttggactctntccctctaaaatgaagtgcagttcctgtgtatcttagattacatttctagtcaat

SEQ ID NO: 13341 - DNA, 338 bp, Bos taurus
  Clone ID: 57-LIB3058-006-Q1-K1-G10
caagaagtcagtcccaaggtgtacttcatgaagcagaccattggcaactcctgtggaaccatcggactcattcatgcagtggccaataatcaggacaaactggagttcgatgatgggtctgttctgaaacagtttctttctgaaacagagaagttgtcccctgaagacagagcaaagtgctttgaaaagaatgaggccattcaggcagcccacgatgccgtggcccaggaaggccaatgtcgggtagatgacaaagtgaacttccattttattctggttaacaacgtggatggccacctctatgaacttgatggacggatgcctttttcagtgaacca

SEQ ID NO: 13342 - DNA, 286 bp, Bos taurus
  Clone ID: 57-LIB3058-009-Q1-K1-G2
gttctagatcgcgagcggccgccctttttttttttttttttttttttttttttttttttttttttttttttttttttttttttttttttttttttttttttttttttttttttttttttttttttttttttttttttttttttttttttttttttttttatgtaaaaaaaacttcgtttttttttttttaataatttttttatgggctaatatttatttttttattgtcttattttggtctatataaaactttttgtcttcttatttattaaatatatttttttta

SEQ ID NO: 13343 - DNA, 416 bp, Bos taurus
  Clone ID: 57-LIB3058-010-Q1-K1-G2
ggacatctttgtgctgatcgcgtccgtgcctgtggttgccgtgggaaaccagggcagcgtccgggccacgtccctgcggagtctgcgcttcctgcagatccttcggatgctgcgaatggaccggaggggcggcacctggaagctcctgggctcggccatctgcgcccacagcaaagagctcatcaccgcctggtacatcgggttcctgacgctcatcctgtcttcatttctcgtctacctggttgagaaagatgtgccggaggtggatgcccaaggagaagagatgaaagaggaatttgagacctacgcagatgccctgtggtggggcctgatcacactggccaccattggctacggagacaagacgcccaaaacgtgggaaggccgtctgatcgcagccaccttttccttaatcg

SEQ ID NO: 13344 - DNA, 219 bp, Bos taurus
  Clone ID: 57-LIB3058-011-Q1-K1-G2
cgcagctgtcgcggatctgaacgcgagctgttcctgtggctgcgcagctaccttgctgcggacagaactgtcaccatgccccactcgtacccagccctttctgctgagcagaaaaaggagttgtccgacattgccctgcggattgtggccccaggcaaaggcattctggccgcagatgagtctgtaggcagcatggccaagcgactgagccaaatcggg

SEQ ID NO: 13345 - DNA, 408 bp, Bos taurus
  unsure (1),(359): unsure at all n locations; Clone ID: 57-LIB3058-012-Q1-K1-G2
ncgtcgggttctcaggatggagcgcgtgtggttggctggcagccattggcttcttccagaccagcgttggggccgctgtggtcatgctgctcccagctatcatgttctccatgtcggctgccatgatggctgtcatgatcatgaaggggcacagcatctaccgagggaccggtgggagcttccagaaggcgcagacggagtggagcacgggcacctggaggaacccgccatccagggaggcccagttcaacaacttctcggggaacagcctgcccgagtaccccaccgtgcccagttacccggccagtggtggccagtggccttagggggagccagcagccctgctgcccacctgccgncagcccacctacccctcaccgtccactcccaccaccttgggtttggtga

SEQ ID NO: 13346 - DNA, 399 bp, Bos taurus
  Clone ID: 57-LIB3058-013-Q1-K1-G10
ggcgctgtgcacgcggctggccatcatggtgaacgggcgcctgcgctgtctgggtagcatccagcatctgaagaaccggttcggggatggttacatgatcacggtgaggaccaagagcagccagaacgtgaaagacgtggtgcggttcttcaacaggaacttcccggaggccatcctcaaggagcggcaccacacgaaggtgcagtaccagctcaagtccgagcacatctcgctggcgcaggtgttcagcaaaatggaacaggtggtgggcgtgttgggcgtcgaggactactcggtcagccagaccaccctggacaacgtgttcgtgaacttcgccaagaagcagagcgacaacctggagcagcaggagacggagccgtcctctggcctacagtcccc

SEQ ID NO: 13347 - DNA, 453 bp, Bos taurus
  unsure (324): unsure at all n locations; Clone ID: 57-LIB3058-015-Q1-K1-G10
cggagcacacaggacaggaatcttatgtttggaagatgtatcaagaaaggtgctgggaattttgcccagccggagactgtttccggaaacagtatgaagaccagctaaattaatctcagtcccagatcaccttcaaaaaccaaaacacacacacatgcacacacacacactctctctttgtctctggccttctgattctagactgtctctctctgttctcttggaaacatcttgctgatgatgtgaactgccagcgttgggagctgtgtttctgaagacctgactctgcttttccccccacctagggtattttcttgaagaatnatctatattcatactcatgataaataggaatttctgaaaggaaaacattctggagattctcaatcattattatacagacaggattccttttgagactcctggaaattgcttgcactctggacatttaca

SEQ ID NO: 13348 - DNA, 261 bp, Bos taurus
  Clone ID: 57-LIB3058-017-Q1-K1-G2
atagaaagaaaaagtggggaggggagaagaggaggaacatgctagcgactgaaagatctctggtgacagccatccagatgtgaaaaaagaaatttcaaaatcaatgggatggtcggatctcacaggctgagaactcgttcacctccaagcatttcatgaaaaagctgcttcttattaatcatgcaaactcttgccacggtgtgaagagtttgacaaatgtttcaaaataaaaagtactgatttagaaaaaaaaaataaaaa

SEQ ID NO: 13349 - DNA, 465 bp, Bos taurus
  unsure (436): unsure at all n locations; Clone ID: 57-LIB3058-019-Q1-K1-G2
gccccccgcaatgtcacaataccaaacccctctgttcgtatgatccgtaataattaccgccgtactactactactctcgctccctgtattagcagccggcatcacaatgctattaacagaccggaacctaaatacaaccttcttcgacccggcaggaggaggagaccctattctatatcaacacttattctgattctttggacaccccgaagtctatattttaatcttacctgggtttggaataatctctcatatcgtgacctactactcaggaaaaaaagaaccattcggatatatgggaatagtttgggctataatgtcaatcggatttctaggtttcatcgtatgagcccaccatatattcactgtcggaatagacgtcgacacacgagcctacttcacatcagccactataattatggctattccaaccggngtaaaagtcttcagctgattggcaacact

SEQ ID NO: 13350 - DNA, 331 bp, Bos taurus
  Clone ID: 57-LIB3058-020-Q1-K1-G2
acgcgttcttagggaagcgagggtgcttagcaaatgaagtggatcgagccagcgtctagaggcaggaagcctaccccttgccaacagagggaaaacactgattaaataataaaaggaagccaaggaaagtaaagtctttgctcatagctcagctggtaaagaatccacccgcaatgcaggagaccccagtttgattcctgctgtcggtaagatctgcgggagaagggacagactacccactccagtattcttggactttcgttgtggctcagctggtaaaaaaaatccggctacaatgcaggcgacctgctttcgatccgtgggttgggaa

SEQ ID NO: 13351 - DNA, 431 bp, Bos taurus
  Clone ID: 57-LIB3058-021-Q1-K1-G2
cgggctagacgtacgcggacgctagtgcatatgaatagatctactggtcgtaattagcacgacatgcttgtggctaacagtgtaaagtgggacagccctatggtggacacacgatagataactctttggatagcatgtttatttctggtaattagttgtgtactttggcctctggcatatcttcacaatggtgctcttttcatggggtattagccattcacgcatagcaggtaatttgaagaacttgattggcttgagaatgatgcccattttcgattttacagctggtatataacttgtttggggtggtcccagaacgggctggacaatgattcttggattatgattgtcttacaaatgaaattgctcattttaacacccaaatgatttgtctgatgcaaggaatgcttcgtgtgtgatagatttttaag

SEQ ID NO: 13352 - DNA, 270 bp, Bos taurus
  Clone ID: 57-LIB3058-022-Q1-K1-G2
catgaagtgatgggaccggatgccatgatcttcattatctgaatgtggagctataagccaactggttcacggtccactttcactttcatcaagaggcttttgagttcctcttcactttctgccatgagggtggtgtcatctgcatatctgaggttattgatatttctcccggcaatcttgattccagcttgcgtttcttccagcccagagtttctcatcacgtactctgcatattacttaaagtggctaggggacaatatactaccttga

SEQ ID NO: 13353 - DNA, 260 bp, Bos taurus
  unsure (93): unsure at all n locations; Clone ID: 57-LIB3058-023-Q1-K1-G10
catctctgcaccttctgccgatgcccccatgtttgtgatgggcgtgaaccacgagaagtataacaacaccctcaagattgtcagcaatgcctnctgcaccaccaactgcttggcccccctggccaaggtcatccatgaccactttggcatcgtggagggacttatgaccaccgtccacgccatcactgccacccagaagactgtggatggcccctccgggaagctgtggcgtgacggccgaggggctgcccagaatatca

SEQ ID NO: 13354 - DNA, 205 bp, Bos taurus
  Clone ID: 57-LIB3058-023-Q1-K1-G2
cggacgcgtggggttctagatcgcgagcggccgccctttttttttttttttttttttgtttttgtttttttttttttttttttttgcatccacagtttttaatttgtttggataatagttacagagaaacaggtacactccatatacaattaccaatacttttttatacaggtcatatttcaggacattaacacttttttattta

SEQ ID NO: 13355 - DNA, 396 bp, Bos taurus
  Clone ID: 57-LIB3058-024-Q1-K1-G2
ctcgccggcccgagtggactcctcggcggccgccatgcagctgacggtgaaggcactgcagggccgcgagtgcagccttcaggtagcatcgctgggctgggttgcgcggtcagccccgccggtgcgggatcgagccgcgggcggtgactgacccggcgggctggccacctcgggagagccgtcctccgcgcgggccgcggcctcaccccccgcccacctttctcggccgggacaggtgtcggaggacgagctggtgtccacgctgaaacatctggtctccgagaagctgaacatcccggtccgccagcagcggctgctgttcaagggcaaggccctggcagatgggaaaagactctccgattacagcatcgggccgaattccaagctcaacctagt

SEQ ID NO: 13356 - DNA, 401 bp, Bos taurus
  Clone ID: 57-LIB3058-026-Q1-K1-G2
tcggccgtaaatagttacccttgactcgataatttatctgttcagtactgtagctaaaagaggaaaagcaaatacaaagttcaaaaacaaagatatagtattgctattctgactaatgtcaagccttttttgagagcataaacttgaaaactaaagctcaaaagagatttacattttcctcctctttttacctttgagacaatagacttgtttagaagtcgcatcttcagtggactactgaatttggaaaagatatcaagttatgtctatttggtgaactttatttttatcttctgttctagattatcatggattagtctgaaatttaaaattctgaccagtctattttcatcttttttttttccagttttcaaaatatttacactgtgcatattcaaaat

SEQ ID NO: 13357 - DNA, 348 bp, Bos taurus
  Clone ID: 57-LIB3058-027-Q1-K1-G2
gagatgttaaactggcttactatagactttgtaaaaacggctccagaagagtagcgaagtgaaatctttgagatcacacaggttggaaatatgtacataactgcacaaggtgtcaattctgctacacagtgcagttttagtcagttttagttgcataggtttccattgtatttatagtctgtttatgctaaatctggccaaagatgagcattgtccaccactaaaatgcctctgccacttttgaattctgtgctaattttgtggccagaatgccgtgatcaaaatgctcaatctttttacagtggcatatgaagatggcaaaaatttcctaaagtgcaatagattttc

SEQ ID NO: 13358 - DNA, 251 bp, Bos taurus
  Clone ID: 57-LIB3058-028-Q1-K1-G2
agctgtcattcctgtggaacagccgtgtgaattgctatggcaacacatttgagaggattgcggacctggaggaaaacttccacatggaaatgagttagctcaaccagaacctcaacgatgtgctcatcagtctggagaagcatcacgggagcaacactgttcacagtcaaggcccaacctagtgacaacgtgcctgcgaaagggaacaagagccccttatcgacacctgatggctcccctgctgacacccc

SEQ ID NO: 13359 - DNA, 446 bp, Bos taurus
  Clone ID: 57-LIB3058-029-Q1-K1-G10
gaatgcacttgcccaacctcggtctcccagtgcagagggagccgccacccccaggggtctgggcctcctgggaggagactcgcatgcagccacaacctcagggggccacctcctccaaccgacagctgcaactgccctgcctggccgccgcctccccgcaagcctcctgtctggatgaaacaacagaacacaggcgagcaaagcacccaaaactcttgtctgcctcccctgttcgcctgactgtctggggccctgagaagcccactgatgccaccactggggccaggtcgcctggctcctgcttcccctgccactatggcccgcgggaggcacacggccttcctggggcaccgtaaccacaggcgcctgccacagacccactagcttttcagtcatgcaagccatgcagatgcccctgatttggcttctaaatacttttcttttcc

SEQ ID NO: 13360 - DNA, 275 bp, Bos taurus
  Clone ID: 57-LIB3058-030-Q1-K1-G2
atctttgcaatagctcagatggaaggtcctgtctttgtctttgcacaccatctctactctttagtagaattgtaaaaggctgccattatggacattaggtatcccaacataaccatctggagtgtgtccagatagttcttcataggaccaattagtatttgcagcttgagttatttatgaagttgcattattgtggtcttagctgtcttgtgaggaatattttcagatgtattctgtgccatactattgttaaaatgaattgttgctattgtgag

SEQ ID NO: 13361 - DNA, 198 bp, Bos taurus
  Clone ID: 57-LIB3058-031-Q1-K1-G10
cggttcgacccacgcggtccgcggataatggtgtccccttcgtccgcactatccaggataaggggattgtcgtgggcatcagaggttgacaagggtgcggagcctctagccggaactgatggagaaaccaccattcaagggctggatgggctctcggagcgctgtgcccagtacaagaaggatggctcttactttgcc

SEQ ID NO: 13362 - DNA, 316 bp, Bos taurus
  Clone ID: 57-LIB3058-031-Q1-K1-G2
cggacgcgtgggtcggaatagacgtctacacacgagcctacttcacatcagccactaggattattgctattccaaccggggtaaaagtcttcagctgattggcaacacttcatggaggtaatatcaaatggtctcctgctataatgtgagccctaggctttatttttcttatttacagtatggggtttaactggaattgtcttatccaactcttccctcgatattgttcttcacgacacatactacgttgtctcacattttcactattgttttattatcaataggagctgtatttctattatagggggatttgttt

SEQ ID NO: 13363 - DNA, 371 bp, Bos taurus
  Clone ID: 57-LIB3058-032-Q1-K1-G2
cgtttaattctggcaaagtggacatcgtcgccttcaatgaccccttcattgaccttcacgacgtggtctacatgttccagtatgattccacccacggcaagttcaacggcacagtcaaggcagagaacgggaagctcgtcatcaatggaaaggccatcaccatcttccaggagcgagatcctgccaacatcaagtggggtgatgctggtgctgagtatgtggtggagtccactggggtcttcactaccatggagaaggctggggctcacttgaagggtggcgccaagagggtcattatctctgcaccttctgccgatgcccccatgtttgtgatgggcgtgaaccacgagaagtttaacaacaccctcaaa

SEQ ID NO: 13364 - DNA, 294 bp, Bos taurus
  unsure (39): unsure at all n locations; Clone ID: 57-LIB3058-034-Q1-K1-G10
ctttgctatgattacattttagatattcatttattctcntctatatctaagactcatatgttgagttttactatcatatatgaatgaagcctttatatcttgtttttttgccaatcttgaaagatagatgggaaaagataaaagaatgttgtctaactcttgattgcttagaaagtatttccatagtcaatgatggttcaataggcaaaccaggtcctataaacctgaattttttttatggtcaatactgttaagcagaaatgtagaacaggactggcaaaaatgtggatgttt

SEQ ID NO: 13365 - DNA, 418 bp, Bos taurus
  Clone ID: 57-LIB3058-034-Q1-K1-G2
cacgttggtaactgcttaatctgaactgtagctttatgtatcttctgttgtcatgaacaggcgagcaacagtacagaacattgatgacacaagcgaaagtcacagtgaaattttcaaaaagggtgtctgtgaggaggacaacaacagaatggccatgctagtctgcttaatcataattgccgtgctctttcttatctgatccattctatttctatcaaccgtggttctggcaaacaaagtctcatatatcagacgatcaatacaagcaggcatgcgttagcctaggagcaatggtgattatctgtcaagcactggtcattggcctgctgaatcagacacttggaaaagagcaaaacagctcacagtgcctaacctaatgatgcaatctactggagtgctcacagctacgatggaaaga

SEQ ID NO: 13366 - DNA, 335 bp, Bos taurus
  unsure (31): unsure at all n locations; Clone ID: 57-LIB3058-035-Q1-K1-G10
gttctagatcgcgagcggccgtccttttttntttttttttctcttttatcatttgtgtggtttgatgtccaattatcatttgttagagaatcataatcaaagaatcattctccagccctctggtagacacaggatagataactttttggatagcatgtttttttctgttaattagttgtgtactttggcctctgtcatatcttcacaatggtgctcttttcatggggtattagccattcagtcatagcatgtaatttgaagatcttgatttgtttcagaatgatgcacattttgcattttccagcttgtctatcacttgtttggggttgtaccac

SEQ ID NO: 13367 - DNA, 393 bp, Bos taurus
  Clone ID: 57-LIB3058-036-Q1-K1-G2
ggaaaagacaaggatttcttttgtccttatagaattttgtagcatttactgtggtgtttaaatgctaaagccaaagtatctgcacttttatgccaagaacgattttagtgaaggctcctttcagatgtaaccttatgagggaaatacctgttttgtttatatgccagttaaattactggtttctaaagtctgttaaaaatgtatttcaatggcacagaccagttttcagatcttacacttatatgataattctttgaataaagcagattagcttatttgtttaattggagtggagacctacctccatgattagataaagattatttgcattaaaatcagaattttgccttttttcttttcaaattataatttaatatatatatatatatgact

SEQ ID NO: 13368 - DNA, 375 bp, Bos taurus
  unsure (21),(347),(350),(357),(365),(368): unsure at all n locations; Clone ID: 57-LIB3058-037-Q1-K1-G2
ggaaggagtggggacagcggnaggcttggggctcggtctgtaggctggtctgtccgtctgggccttcactaatgctgtctcagtgttttttctctctctctctcgagctcgtactccggtaccgacccagcaccctggcccgtcccatgccggggggcagggcaagaagacaggccgctccgcccgcgcccgcctgcggtgggggcatgcccgctgcccgccgcccgcctgccgctccacagactcttgttgccagccctccggggcctcagtgtttggggcgaggggagccgcctagagactgtgccctgccctcggcccccgagcccagaagccaccgtcgccgncgncacccgncacgccgncgncacactg

SEQ ID NO: 13369 - DNA, 427 bp, Bos taurus
  Clone ID: 57-LIB3058-042-Q1-K1-G2
cttttctgttaattgctgttaaatttttaaatttcagaatttgtggtatatatatatatgtcataaaaccttaaacaaagttaatgcattgaatgggtagattaaatttattttcaaatgattggagatatgaatattctacaagttgccctggaatgatttcaatataaattgaaattggtaaaaagcctatatttaaatcagctgattatgtcattaaaaatgaggtagtatttaatcactattaatgcttgataatcttagaatgcagaagatattaacagtaaatattaggtcttaactaaaaggaaaaagtttcaaatatctaattaacatattttctgcccaaccaccatctaaactaatcctctagagttaacatctttaattttttaattatttatttctagttgaaagataattgctt

SEQ ID NO: 13370 - DNA, 131 bp, Bos taurus
  Clone ID: 57-LIB3058-043-Q1-K1-G10
cacaattagtaatcaactgttttgtattcttgttttcagctgtcatttcgacaaacaagcactgtaattacagctattagaataaaatctcttaactattaaaaaaagagaaaatgaattataatgaaaat

SEQ ID NO: 13371 - DNA, 368 bp, Bos taurus
  Clone ID: 57-LIB3058-043-Q1-K1-G2
gcgtctggcaggatcaggaaggggcctgtacctctcaaccttgaagttccctcatatgagttcaccagcgatgatatggtgattgttggttagagacctggactcgagttacaggcttctttcagtcttcatgtcacctcagaagagttacttgagaacaagccttctgtgctttgaattagttgatttgaaatatttaagaattgctaataatgtgtttgcaaacatgtaaattgaatttaatgttgaatactttcaagcattcacctaaaaaagcccccattaaacattgttatgctcaaagggtgcagtgtctttgatagttaattctaattaaaaattgtagatgagtgtataaaatatttgtg

SEQ ID NO: 13372 - DNA, 392 bp, Bos taurus
  Clone ID: 57-LIB3058-044-Q1-K1-G2
atgcttaatttgaaaataccttttgttttatgataccatatatatttataatgtcacctgtttgtgggccagacagaagctcagagccagacatctgtcattctgaatcctgattaatggtcccctctataccacactagggcttccctggtggctcagacagtaaagaatcgcctgaaatgtatgggtcaagagttccattcctgggtcaggaagatcccctggagaagagaatggctacccactctagtattcgtgatgggagaatcccattgacagggagtgtggcgggctacagtccatggggtcacaaagagctggacacgactgaacgaccaaggcttttccacactggtttcagatactgactgcctgtgtggtactaggtgtct

SEQ ID NO: 13373 - DNA, 429 bp, Bos taurus
  Clone ID: 57-LIB3058-045-Q1-K1-G2
ggggaattcaccaagcgttggattgtttttccactaatagggaacgtgagctgggttgggaccgtcgtgagacaggttagttttaccctactgatgatgtgttgttgccatggtaatcctgctcagtacgagaggaaccgcaggttcagacatttggtgtatgtgcttggctgaggagccaatggggcgaagctaccatctgtgggattatgactgaacgcctctaagtcagaatcccgcccaggcggaacgatacggcagcgccgcgggagcctcggttggcctcggatagccggtcccccgccgtccccgccggcgggccgtcgcccgcgtcccccggggcgcggcgcggcgcgcccccgccgcgcgtcgggaccggagtccggtgcggagagcccttcgtcccgggacacggggcgcggtcggaaa

SEQ ID NO: 13374 - DNA, 436 bp, Bos taurus
  Clone ID: 57-LIB3058-046-Q1-K1-G2
gcctgaccctttaaaggctaatgacagtgttatctaagacacagtccactggctcagttcccaggattagcttactctgtgacttgtgttagtcaggacaaccttgtgcttctcagattttgaagtgctgctggtaagctatgtgccagctttgcctttctcttgagcgtgagcatttcagatcaaaggggtcagcattcaccgtaaagctaatctgcctttggctgggtgtccaacttgaaagaacagagcccgtgtggtttagttacatgtcttactatacgtacctgcactttcagcttctgtatttactaaccaagggagaaagaacaaaaaacactctctactaaccagaggacagtgatcacagtgcttcaccaaacatcgtaattagtttaactccaggaagacatcaaggcaaggagtagaacccttt

SEQ ID NO: 13375 - DNA, 348 bp, Bos taurus
  Clone ID: 57-LIB3058-047-Q1-K1-G2
gtggccttttactatgaaatttaatattctttttttttatacctttgtaatcatgtaggcagtttaaggaggactacatgggggaaagggttagttttattcccaacgagtagacttctccattcactcaagttgagttatgttgttcaactgttcatatagtcatagtatggtgctgtcagaaaatatgttaacatgcattgcccactcagtgtgccacatctccagctgcagcccaaggatgtgcttgggtgggtccataacactggggttatctcaactctactcaagacttgcaacatatactcgtggcccaaaaagaaggaagtggccccctctttggggtgc

SEQ ID NO: 13376 - DNA, 240 bp, Bos taurus
  Clone ID: 57-LIB3058-051-Q1-K1-G10
cattgttgggctgtttggaatattaattatgtggatgtatggctacttttggattacaggaatgcttctagttgctggaggttgtatgtgctctttgaaacatgctcgatatgtgatacctgttttgacttcatatggtgtttattctgtggcatgatcgtgttgggtctgcttgtagtctttttgacactaaacctctattttttgactaatgattcattttattttgttagttgcatg

SEQ ID NO: 13377 - DNA, 394 bp, Bos taurus
  Clone ID: 57-LIB3058-051-Q1-K1-G2
gccgcttcacggtgctgaccgagagcgccgccttgaacaccgatgctgtgcgcgccggcaaggacgaggtgtccgagagccgccgcctgcttaaggccaagaccctggagatcgaagcatgccggggcatgaacgaagccctggagaagcaattgcaggaactagaggacaagcagaacgccgacattagcgctatgcaggacacaatcaacaaattggaaaatgaattgagaaccacaaagagcgaaatggcaagatacctcaaggaataccaagacctcctcaatgtcaagatggctttggacattgagattgcagcttacaggaaactcttggaaggtgaggagacccggctcagtttcaccagtgtgggcaggctaaccaccggttacac

SEQ ID NO: 13378 - DNA, 426 bp, Bos taurus
  Clone ID: 57-LIB3058-052-Q1-K1-G10
gcaggagtttcctcaattttaggagccatcaacttcattacaacaattatcaacataaagccccccgcaatgtcacaataccaaacccctctgttcgtatgatccgtaataattaccgccgtactactactactctcgctccctgtattagcagccggcatcacaatgctattaacagaccggaacctaaatacaaccttcttcgacccggcaggaggaggagaccctattctatatcaacacttattctgattctttggacaccccgaagtctatattttaatcttacctgggtttggaataatctctcatatcgtgacctactactcaggaaaaaaagaaccattcggatatatgggaatagtttgggctataatgtcaatcggatttctaggtttcatcgtatgagcccaccatatattcact

SEQ ID NO: 13379 - DNA, 374 bp, Bos taurus
  Clone ID: 57-LIB3058-053-Q1-K1-G10
cttcatttctctccattgcttttgccttttacttctgccacaccggccttttcctttgccttttctcagtgcttctcttctgacctgcatgtcgagttctgtattgctgtggcttccaaggaagaaagcaagtcccacgttggatagccccttgtttttagtcagctgtgatcaacagacagcctttgggacaccttgctttcaaaacaaggataaagtatctgttgatctctgcagattccttcctataactatttataggtagtcctgactccactacccgcttcccaaatgggctgttcacgcggaagaggctcacgtttcacacagcagaacccgagagaatggtgtgaactgtccgtggggagtgcatg

SEQ ID NO: 13380 - DNA, 430 bp, Bos taurus
  Clone ID: 57-LIB3058-053-Q1-K1-G2
cctgcatcttgcctttctgatgacaacttctttttctttgtctcctggaacaaaagcaaactatacccatctgtgggataacaattctactgtcttggatccagatattcacaacaagacggacagaagccaaaatgaaaactttaacgcaaaccctaaaactcctgaagcagataaaaaagataattctacaaacatgcctgaaacagaaacatcatctcacatcacgtttttaactcctaaatctgaactggagctttatgtatcttctgttgtcaggaacagtccaccaacagtacagaacattgaaaacacaagcaaaagtcacagtgaaattttcaaaaagggtgtctgtgaggaggacaacaacaaaatggccatgctagtctgcttaatcataattgccgtgctctttcttatctgtaccatt

SEQ ID NO: 13381 - DNA, 443 bp, Bos taurus
  Clone ID: 57-LIB3058-057-Q1-K1-G2
gttgacgctggagggtatccgtcagttctacatcaatgtggaacgagaggagtggaagctggacacactgtgcgacttgtatgaaaccctgaccattacccaggcagtcatcttcatcaacacccgaaggaaggtggattggctcaccgagaagatgcatgcccgagacttcaccgtctctgccatgcacggagacatggaccaaaaagaacgagacgttatcatgagggagttccgctctggctctagcagagtattgattaccactgacctactggccagaggtattgatgtacagcaagtttccttagtcatcaactatgacctccccaccaatagggaaaactatatccacagaattggtcgtggcggacgtttcggccgtaagggtgtggctattaacatggtgacagaagaagacaagaggactcttcgagacatcg

SEQ ID NO: 13382 - DNA, 416 bp, Bos taurus
  Clone ID: 57-LIB34-001-Q1-E1-G10
acccacgcgtcagacaccacaaaactttggcacaatgaagtgggtgacttttatttctcttctccttctcttcagctctgcttattccaggggtgtgtttcgtcgagatacacacaagagtgagattgctcatcggtttaaagatttgggagaagaacattttaaaggcctggtactgattgccttttctcagtatctccagcagtgtccatttgatgagcatgtaaaattagtgaacgaactaactgagtttgcaaaaacatgtgttgctgatgagtcccatgccggctgtgaaaagtcacttcacactctctttggagatgaattgtgtaaagttgcatcccttcgtgaaacctatggtgacatggctgactgctgtgagaaacaagagcctgaaagaaatgaatgcttcctga

SEQ ID NO: 13383 - DNA, 357 bp, Bos taurus
  Clone ID: 57-LIB34-001-Q1-E1-G2
gccaactatgcatagtactgccacctggcccgaggcccgaatcatgctgtggtctcacggaaagataatgcaacttgtgtggagaaaatattaaacagacagcaggatgattttggaaaatctgtaaccgactgcacgagcaatttttgtttattccaatcaaattccaaggaccttctgttcagggatgacactaaatgtttggcttcaattgcgaaaaaaacatatgactcctacttatgggatgactacgtcagagctatgaccaaactgagacaatgctcaacctcaaaactcctggaagcatgcacattccacaataccttaaaatccaaggagtgggagccaacaccctga

SEQ ID NO: 13384 - DNA, 368 bp, Bos taurus
  Clone ID: 57-LIB34-002-Q1-E1-G10
acgcgtcagctgaaagagaaggaggtgatacaggatgtggtggcagaaaaatgaagaggatcctggttttcctccttgctgtagcctttgtgcatgctctagagagaggccgagattatgagaaagataaagtctgcaaggaccttgccagcctgggaagagatgacttcacatctttgtcaatggtcctatacagcagaaaatttcccagtggcacctttgaacagatcagccatcttgtgaatgaagttgtttccttaacagtaacctgctgtgcggaaggggccgatcctgactgctatgacaacaggacttcagcattgtctgacaagtcctgtgaaagcaactctccattcccagtgcaccct

SEQ ID NO: 13385 - DNA, 407 bp, Bos taurus
  unsure (333): unsure at all n locations; Clone ID: 57-LIB34-002-Q1-E1-G2
acatgtatccgcttctatcacccggataaagaggacggaatgctgagcaaactctgccacaaagatacctgccgctgtgcagaggagaactgcttcatgcaccacacggagaaggaggtcactctggaggaccggctggacaaggcttgcgagccgggcgtggactatgtgtacaagaccagacttatccagaagaagctggaagatgactttgacgagtacatcatggtgatcgagaacatcatcaaatcgggctcggacgaggtgcaggttaaacaggagcgcaagttcatcagccacatcaagtgcagggaagcccttaaactgaagganggggcacactatctcgtgtggggcgtgtcctctgacctgtggggcgagaaaccaagatcagctacatcatccgg

SEQ ID NO: 13386 - DNA, 310 bp, Bos taurus
  unsure (29): unsure at all n locations; Clone ID: 57-LIB34-003-Q1-E1-G10
tatagatgagactgtgaagaataatatcncaactaagcttcgtgtgctccgttcaattctggagaatttgagaagcaaaatacaaaaattagaatcggatgtctcaactcagatggaatactgccgcaccccgtgtactgttacttgcaatattcctgtggtgtctggcaaagaatgtgaggaaatcatcaggaatggaggtgaaacatctgaaatgtacctcattcagcctgaggattctagcaaaccatatagagtatactgtgatatgaaaacggaaaaaggaggatggacagtaattcagaaccgt

SEQ ID NO: 13387 - DNA, 418 bp, Bos taurus
  Clone ID: 57-LIB34-003-Q1-E1-G2
gctattccacacgtgtttgtgagacttaagcatcttgtggatgagcctcagaatttaatcaaacaaaactgtgaccaagtcgaaaaacttggagagtatggattccaaaatgcgctcatagttcgttagaccaggaaagtaccccaagtgtcaactccaactcacgtggaggtttcaagaagcctatgaaaagtgggtaataggtgttgtacaaagccgggatcagaatgaatgccctgtactgaagactatctgagcttgatcctgaaccggttgtgcttgctgcatgaaacgacaccagtgaatgaaaaagtcaccaagtgctgcacagagtcattggtgaatagaaggacatgtgtctctgctctgacacctgatgaaacatatgtacccaaagccattgatgagaaattgttca

SEQ ID NO: 13388 - DNA, 373 bp, Bos taurus
  Clone ID: 57-LIB34-004-Q1-E1-G2
cgaggaactccagaggaaaaaagacaggtttcttgtcaacttagtgaaactgaagcctgaacttgcaggggaggaactgtggtcgttgctggcggatttcacgaatgtggtggagaagtgctgcaaagcccaggagcctgaggcctgcttcaaggaggagagtccaaaattggcagccaaaagtcaggctgcttgaaaaacatcaaattaaacccaactaaaggttcctaaaacaatgacgaagattaacttacctatttcccagctgtcctgtggtgaatttcattttctgaaaagaacacagttaacagattcctctgtacctattgtctgagaaaatgttaatgcagcaagcaataaacaacaacattat

SEQ ID NO: 13389 - DNA, 409 bp, Bos taurus
  Clone ID: 57-LIB34-005-Q1-E1-G2
gcggaggagaatgtcattgaatcttgacagtgacgtttgcctccagctgcctgacaggcagcaggtcagcagctcaaccccacagaagccagcaccaagtgaagctgaaaaaataaggccaaaatgtgaaaatgaccttcaaattaaatatatgaaattggatatattccccaagtcaatctacacaattgcatttccagcatttgtataaggtacctaattaacagtgatccaaaaataggaattggatttgtgcaaacatggagaaattgacttccataaaatttaagtcaaagaaattttgacccaaaccatatttttattcagctgagaggtggttgcagcgtttggttagcatgtctttctttttctttttccagtattctacttgcgttaatgagaacagaaa

SEQ ID NO: 13390 - DNA, 393 bp, Bos taurus
  unsure (269),(296): unsure at all n locations; Clone ID: 57-LIB34-006-Q1-E1-G10
actacaacttccaccacagctactacatcaggtacaactaataccactctatctccaactatacaacctacgcggaagtctacctttgatgcagccagtttcattggaggaattgtccttgtcttgggtgtgcaagctgtaattttctttctctataaattctgcaaatctaaagaacgaaactaccacactctgtaaagagacccactaaattaacaaagactggcgtgtaactcactgaaaccaaaatattatctttcaagatgtcncacatggaagacgctattctaggatcnttaatttttcaaagggatgcatataagagcatcacccttgaagaagaatcagttcagtcactttgctcaacgggcctatttaaagtacgctgcatga

SEQ ID NO: 13391 - DNA, 401 bp, Bos taurus
  Clone ID: 57-LIB34-006-Q1-E1-G2
ggatactctaccgctaaatggtaattttaacaacagctactcactgcgcaagggggactataatgacagtgtgcaggttgtggactgtggactaagtctgaatgatactgcttttgagaagatgatcatttcagaattagtgcacaacaacctacggggcagcagcaaggctcacaacctcgagctcacactaccagtcaagcctgtgattggagggagcagcagcgaatatgatgctattgtggcagatgcttcatctctcatgcatggtgacaatcctggactggagctccatcacaaagaactcgaggccccgctcatccctcagaggactcactcccttctgtaccaaccccagaagaaagcaaagcccgaggggactgacagctacgtatcccagc

SEQ ID NO: 13392 - DNA, 406 bp, Bos taurus
  Clone ID: 57-LIB34-008-Q1-E1-G2
gtatttacagctccccttttgggagaggaaagccgctctggcagcgccggcgtgacccacccgccatgctcaccccagcgctcgtcttgctgttggggtttctctgccacgttgctatcgcaggacgaacctgccccaagccagatgagctaccgttttccacggtggttccactgaaacggacctatgagcccggggagcatatagtcttctcctgccagccgggctacgtgtcccggggagggatccggcggtttacatgcccgctcacatgactctggcccatcaacacgctgaaatgcatgcccagagtatgtccttttgctgggatcttagaaaacggaacggtacgctatacaacgtttgagtatcccaacaccatcagcttttcttgccacacggggtt

SEQ ID NO: 13393 - DNA, 401 bp, Bos taurus
  Clone ID: 57-LIB34-009-Q1-E1-G10
cactacagtagctctgggtctcttggaggactctatgaactaatatatgttttggataagaagtccatggagcagaaagatattgaactgagggacgtacagagatgcctcgggtttgatctggatttgtctctgaaggttggagttgaagttacgggaaattttgattcaaaactttgctcaaagaagggtatgggtcaaacagaaacgaacccagaggctgacctcttcgatgatgttatcaccttcataagaggaggaaccagaaaatacgcaactgaactgaaagagaaacttctcagaggagccagaatgatcaatgtgactgactttgtaaattgggccgcttccttaaatcatgctccggtgctcataagccaaaaactagttccgatatatga

SEQ ID NO: 13394 - DNA, 229 bp, Bos taurus
  Clone ID: 57-LIB34-009-Q1-E1-G2
cgtccgtagcaccaagcgccccacgaacgtgcggtgcgtgacgggcgagggggcggccgcctttccggccgcgccccgtgtcccgggacgaaaggctctccgcaccggaccccggtccccacgcgcggccggggcgcgccgcgccgcgccccgggggacgcgggcgacggcccgccggcggggacagcgggggactgggtaaccgaggcgaacggacgcccgcggggct

SEQ ID NO: 13395 - DNA, 418 bp, Bos taurus
  Clone ID: 57-LIB34-010-Q1-E2-G10
ggcctctccagctcaccatggctcgggcattgagagtgccagttgcactgtggctgttgggcttgtgctggtctttggctaaagcccaccctctggctagagctcctgagcttgggcacggagttgaaggtgggaatgtggccaagccggatccagaagtgacggaacgctgctcggatggctggggctttgatgctaccaccctggatgagcatgggaacatgctgtttttaaaaggggagtttgtgtggaagggtcatgcctgggcccggcagttgatctcagagaggtggaaggatgcccccagtcccgtggatgctgcattccgctatgatcgtaacagtgtccttctgatcaagggggacaaattctgggtatatcctcctgagaagggggaggaatatccaaagttgctcca

SEQ ID NO: 13396 - DNA, 279 bp, Bos taurus
  Clone ID: 57-LIB34-010-Q1-E2-G2
aaacatcataactcttgtaagacgactaatatagcgatcccacctaatatcctcccttccatgcttacaacgaataatgctagccctattcggtatagcagccctaacaatcggcaactcacattttacattagctagcatgatacctagtatcctactagtcttcgcagcctgtgaagcagccctaagtctatctctactagtcatagtatgaaatacatatggcactgattatgtacaacacctcagcttactccaatgctaagatacattagtcca

SEQ ID NO: 13397 - DNA, 429 bp, Bos taurus
  Clone ID: 57-LIB34-011-Q1-E1-G10
accacacgtccgccaggctcggagccccgggcccgccgacaccatgagttggtcctcgcaccctccgagtgtaatcttctacattctttcattgctttcttcagcatgcctggcatatgttgctacccgagacaactgctgcatcttagatgaaagatttggtagttattgcccaactacctgtggaattgcagatttcctgaataattaccaaaccagtgtagacaaagatctacgaactttggaaggcatcttatatcaggttgagaacaaaacatcagaagccagagagctggtcaaagcaatccaaatcagctataaccctgatcaaccatcaaagccaaataacatagagagtgctaccaagaattccaagagtatgatggaagaaattatgaaatatgaaacactgatatcaacacatgaatc

SEQ ID NO: 13398 - DNA, 412 bp, Bos taurus
  Clone ID: 57-LIB34-011-Q1-E1-G2
attgagacttgccaaggaatatgaagccacactggaggaatgctgtgccaaagatgatccacatgcatgctattccacagtgtttgacaaacttaagcatcttgtggatgagcctcagaatttaatcaaacaaaactgtgaccaattcgaaaaacttggagagtatggattccaaaatgcgctcatagttcgttacaccaggaaagtaccccaagtgtcaactccaactctcgtggaggtttcaagaagcctaggaaaagtgggtactaggtgttgtacaaagccggaatcagaaagaatgccctgtactgaagactatctgagcttgatcctgaaccggttgtgcgtgctgcatgagaagacaccagtgagtgaaaaagtcaccaagtgctgcacagagtcattggtgaac

SEQ ID NO: 13399 - DNA, 442 bp, Bos taurus
  Clone ID: 57-LIB34-012-Q1-E1-G2
gggtccagccacgcgtccgagctatttcagatcaaagcagtcttcctccctaagaaactacccaaggaacaatgatagagtcttcttcctcggctgtctgcagaaaagtgtcaatgaagcatcagcgagttccagttatgatccttcatagcaaggggacaatggcatcctggcccttctctaggctgtggagtatctctgatccaattctgttccaagtgaccttggttgctactctgttggccactgttcttggcagttgtggtattccaccctatttagactttgcttttccaataaatgagttgaatgagacaaggtttgaaactggaactactctgagatacacctgtcgtcctggctacaggataagttcaagaaagaactttcttatctgtgatggaacagacaattggaaatacaaagagttttgtgtcaaaaa

SEQ ID NO: 13400 - DNA, 392 bp, Bos taurus
  Clone ID: 57-LIB34-013-Q1-E1-G10
gtcgacggacgcgtccgggaagaatattcacatttaaaaggaaattctgacaaatgtcacaacatgaaggaaccttatgctaagtgaaataagtcaatcagaaaaagataaatactgtacaattcaacttataagaagtatccagactaatcacatttgtagaaacatagggtagaatgaagcttgccagaggctagagaatgaggaatgtagcgtttcttaatgagcatagaattccggttttgccagatgcaaaagttctggagattggttacacagtgggaatatacttaatgttgctatactatacacttaggaatgattaacacagtaaattttatgtcatgtgtactttacaacaatagtttttttaaaaacctctactacagact

SEQ ID NO: 13401 - DNA, 403 bp, Bos taurus
  Clone ID: 57-LIB34-013-Q1-E1-G2
gggtcggcccacgcgtccaactgggtgctcctcttgagtcagccctatccacggcagagatgttttccgtgagggacctctgcctggtcctgagtttggtgggtgcaattaagacagaagatggtagtgatcctcccagtggtgactttttaactgaaggaggaggggtgcgtggcccaagacttgtggaaagacagcaatctgcctgcaaagagacaggctggcccttctgctctgatgaagactggaatagaaaatgcccttctggctgcaggatgaaagggttgattgatgaaatcgatcaagattttacaagcagaataaataaactaagagattcactatttaagtatcagaagaacagtaatgactctaatacattgcacaggaccatagtggaact

SEQ ID NO: 13402 - DNA, 439 bp, Bos taurus
  Clone ID: 57-LIB34-018-Q1-E1-G2
ttccaggccgacccacgcgtccgcggacgcgtgggggcctctccagctcaccatggctcgggcattgagagtgccagttgcactgtggctgttgggcttgtgctggtctttggctaaagcccaccctctggctagagctcctgagcttgggcacggagttgaaggtgggaatgtggccaagccggatccagaagtgacggaacgctgctcggatggctggggctttgatgctaccaccctggatgagcatgggaacatgctgtttttaaaaggggagtttgtgtggaagggtcatgcctgggcccggcagttgatctcagagaggtggaaggatgcccccagtcccgtggatgctgcattccgctatgatcgtaacagtgtccttctgatcaagggggacaaattctgggtatatcctcctgagaagggggagggatat

SEQ ID NO: 13403 - DNA, 381 bp, Bos taurus
  Clone ID: 57-LIB34-019-Q1-E1-G2
aggtaaacagcattccagtaggtaaagaatgatactgtcccacatctgggcttgaccaccgtccccctcgctggacatgtcctgggcttcagaccttgattgttggactccgagcatttaatacctgtttctctttacagtgacttttctttgtttcagaaataatcatgtttcaaaaagtacacaaaagcagagaagaatatttaatcactgaacagaagcaaatactgttaatattttgatacttaatcttccagtgttttgtatatgtacttttaaattttttttatcaaaagtgaagttaaatgatcctctacccagtatttgtaaccatcttgtttcataacttattttcctgtgtcattaaacaattacatcaag

SEQ ID NO: 13404 - DNA, 174 bp, Bos taurus
  Clone ID: 57-LIB34-020-Q1-E1-G10
gtgaacactgacccgaaacttggacatcacaggagatggagatctgtttagctgggaacagatacttcgcatatggcttttttgggcatataatatcaaatcagtcttggaatatctgaaaacttcacttaccaataaaaatcctttaaataaaattgctaaaatcatcacatc

SEQ ID NO: 13405 - DNA, 436 bp, Bos taurus
  Clone ID: 57-LIB34-021-Q1-E1-G10
gagcaacttaaagggcccgcgcgccaccgccccctcggcccgccatgctgctacccgtgccgctgctgctcggccttctcggcctggccgccgctgatcccaccgtttactttaaggagcagtttctggacggagacgggtggaccgagcgctggatcgaatccaagcacaaaccggattttggcaaattcgttctcagttccggcaagttctatggtgaccaagagaaagatagaggcctgcagactagccaggatgcccggttctacgctctgtcggccagatttgagcccttcagcaacaagggtcagacgctggtggtgcagttcacagtgaaacacgagcagaacatcgactgtgggggcggctatgtgaagctgtttccagctggtttggattagacagacatgcacggagactcccgaatacacataat

SEQ ID NO: 13406 - DNA, 396 bp, Bos taurus
  Clone ID: 57-LIB34-021-Q1-E1-G2
aatgagacttgccaaggaatatgaagccacactggaggaatgctgtgccaaagatgatccacatgcatgctattccacagtgtttgacaaacttaagcatcttgtggatgagcctcagaatttaatcaaacaaaactgtgaccaattcgaaaaacttggagagtatggattccaaaatgcgctcatagttcgttacaccaggaaagtaccccaagtgtcaactccaactctcgtggaggtttcaagaagcctaggaaaagtgggtactaggtgttgtacaaagccggaatcagaaagaatgccctgtactgaagactatctgagcttgaatctgaaacggttgtgcgtgctgcatgagaagacaacagtgagtgaaaaaattcacaagtgctgcac

SEQ ID NO: 13407 - DNA, 437 bp, Bos taurus
  Clone ID: 57-LIB34-022-Q1-E1-G2
gagctggcgaggctcatgctggagggcttcgcgtctggggaaaaactggtggcagctggtggcagcgagggtaccggtgaccatgagatctctgcgactgctcagaatccccttcctgtgtggcttgctctgggccttttgtgccccgggtgccagggccgaggagcccagggccagctcctcccatcacggcagcatgggcctggataagaacacagtgcatgaccaagagcatatcatggagcatctcgaaggtgtcatcaacaaaccagaggcggagatgtccccacaagagctgcagctccattatttcaaaatgcatgattatgatggcaataatctgcttgacggcctagaactctccacggccatcactcacgttcacaacgaggagggaagtgagcaggcaccaatgagcgaagatgagctgatcaact

SEQ ID NO: 13408 - DNA, 373 bp, Bos taurus
  Clone ID: 57-LIB34-023-Q1-E1-G10
cgggtcgagcaccgcgtccggattgtttggcaagagccttgaatcaaatgtcaaaggtgatacaagtggaagcctaaaaacaattctggtctccctgctacaggctaatcgtgatgaatgagataatgtggacaaagatctagctgggcaggatgccaaagagctgtatgatgcaagggaaggccgctggggcacagacgagcttgccttcaatgaaatcctggccaagaaaagccacaagcagtttacaggcaactttcaagcctagcaaactctcatccggaaagacatccaagaggccatcgaggcagaaacatcatgagacctgcagaacgcctacttaacgcttgttaggaacaccccggacctccag

SEQ ID NO: 13409 - DNA, 321 bp, Bos taurus
  Clone ID: 57-LIB34-023-Q1-E1-G2
ccggggaagaccctggcggatgctgaaggagatgtgtttcgaggcctccaggtggttgagcatgcctgcagtgtgacatccctcatgctgggggagaccatgccatccatcaccaggagacatggacctttattcctaccgtctgcctctgggggtatgcgcaggcattgctccgttcaattttcctgccatgatccccctttggatgtttcccatggccatggtgtgtggaaataccttcctgatgaaaccatcagagcgagtccctggagcagctatgcttcccgccaagctgtttcaggactctggtgcccctgatgg

SEQ ID NO: 13410 - DNA, 429 bp, Bos taurus
  Clone ID: 57-LIB34-024-Q1-E1-G2
tgaatctctcactaacgtgacctactactcaggaaaaaaagaaccattcggatatatgggaatagtttgggctataatgtcaatcggatttctaggtttcatcgtatgagcccaccatatattcactgtcggaatagacgtcgacacacgagcctacttcacatcagccactataattattgctattccaaccggggtaaaagtcttcagctgattggcaacacttcatggaggtaatatcaaatggtctcctgctataatgtgagccctaggctttattttcttatttacagtagggggtttaactggaattgtcttagccaactcttccctcgatattgttcttcacgacacatactacgttgtcgcacatttccactatgttttatcaataggagctgtaattgccattataaggggatttgttca

SEQ ID NO: 13411 - DNA, 367 bp, Bos taurus
  Clone ID: 57-LIB34-025-Q1-E1-G10
aaaaaattatcagtatgggaagaaattaataaatatttagatttctccctttttaagcatagaggatttctgatatacttatctggaaatgtcattatgtttctggggttcttcgcccctgttatattcttggctccatatgctaaagacaaaggaattgatgagtattctgcagctttcttgctctctgttatggcttttgttgatatgtttgccagacctactgtaagacttattgccaattccaaattaatccgaccccgaatccagtacttcttcagtttcgcagtgatgttcactggaatctgtcatctcttatgtgcgttggctgacgactacacaagcctggtggtgtatgctgtaattt

SEQ ID NO: 13412 - DNA, 425 bp, Bos taurus
  Clone ID: 57-LIB34-026-Q1-E1-G10
tcgacacacgcctctacactaagtcgtgacaatgaataaggatcccaggagaggaacgataaggaacgggcatggttgtgcctctaaggtgattgtaactaatcctgccagacacacccacatcaggaccttcttgaggcacgagagagcataatctccactaactgcatctttgattacaccaagggaaccggctgtgatgactcacgaggcatcattcagaacaatccttacgtgcatttttgtcttatcccacctgagcactaatatgtagtatcaagccaaagatttggggcaatcgaaaaatctccgttttacagatacacttttaggttttggtcagttcactgagttcaagaattctttacccgcctttacgacagggctacgcgaccaaacccctgatttcctgttactttccgttt

SEQ ID NO: 13413 - DNA, 333 bp, Bos taurus
  Clone ID: 57-LIB34-026-Q1-E1-G2
cggactacgagacctttgccgtgcagtactcctgccgcctcctgaacctcgatggcacctgcgctgacagctactctttcgtgtttgcccgagaccccagcggcttttccccggaagtgcagaaaatcgtgcggcagaggcaggaggagctgtgcctggccaggcagtaccggctgatccctcacaacggttactgtgatggcaagtcagaaagaaacattttgtagcaacatggaaggtgtcctttcattaggaaacttcccattaaccttactcagcctccaactcgtaggagtttagtttgcgtcacctcgcctccctgcccctcccggg

SEQ ID NO: 13414 - DNA, 254 bp, Bos taurus
  Clone ID: 57-LIB34-027-Q1-E1-G10
ataatacagaaacacccctgtttgcccacaggaccagccaaaacctcgcctcatgtcatacatacgagagttttctggaacattcaacttcagtattactgcagccatttagcgcccatacctttccaactacacgatcatcccatagactgtcacatctgcccagcatgcatccagcgatgacaaacacctatctccagccacccatatactgtgaagtcaatggagtttgatcccgtaaactcctactgtca

SEQ ID NO: 13415 - DNA, 418 bp, Bos taurus
  unsure (368): unsure at all n locations; Clone ID: 57-LIB34-027-Q1-E1-G2
agcagccgcggcaattccagcttctcctgtgctgatgaaggtttttcctgcccctgcaccttcgtggctgctgtgtccggggccagcggcagcgtcctctgggagaggcctgtggcccaggacagggccttcgtggagtgcggcatcgtgcagcccaggggcagcgcggcgccctctgcctgcgtcgtcctcggcaggcccggctctctcgtcgctgtggacacgctcacagggaagaccctgtggagccggcctagcagcttcgggggaaatgcgtccgtcctgagccctctgctccgcgtgcctgaccttgacgccgacggggccccggacctgctggtccttatccaggaggagaaccaggtcancggctccatctactcaggtggcaccgggcagcaggtcagccccccagaca

SEQ ID NO: 13416 - DNA, 238 bp, Bos taurus
  Clone ID: 57-LIB34-028-Q1-E1-G2
ccacccacgcgtccgcacgggccaagatgactaagtctgcacgccgccatcgcaaacgctaccgctcgctccgaagccgtggtcgaggccgcggccgaaaccagaacccctaccggcgatctcgatctgcctgggtgtcctggctctccaaccaggagctgggcctgggagccaacaagtatgatagcttcgagatggactggcttgtgcctgccagctgtgaccccagccacagggt

SEQ ID NO: 13417 - DNA, 369 bp, Bos taurus
  Clone ID: 57-LIB34-029-Q1-E1-G2
gataataaatataatggagtttttcaagaatgctgccaagctgaagataaaggtgcctgcctgctaccaaagattgaaactatgagagaaaaagtactgacttcatctgccagacagagactcaggtgtgccagtattcaaaaatttggagaaagagctttaaaagcatggtcagtagctcgcctgagccagaaatttcccaaggctgagtttgtagaagttaccaagctagtgacagatctcacaaaagtccacaaggaatgctgccatggtgacctacttgaatgcgcagatgacagggcagattttgccaagtacatatgtgataatcaagatacaatctccagtaaactgaaggaatgctgtgat

SEQ ID NO: 13418 - DNA, 415 bp, Bos taurus
  Clone ID: 57-LIB34-030-Q1-E1-G2
aggacgcgtgggttggaatttgtgaagtccctgtgtttggggccagcactgatccacacagccaaatttgcacttgtcttccctctcatgtatcacacctggaatgggatccgacacttgatgtgggatctaggaaaaggcctgacgatttcccagctacaccagtctggagtggctgtcctggttcttactgtgttgtcctctgtagggctggcagccatgtgaagagccgaagttcccagtgtcatcatcctacaaattatcacattgacctgtcttcctgtttgttactcttgtctttggccagggcaaagttattcggatttgtttagacccttctttgcttggagatccccttggagctcagcagtagagtaccttacagaaccataacggtggaaaaaggtccagtttt

SEQ ID NO: 13419 - DNA, 412 bp, Bos taurus
  Clone ID: 57-LIB34-031-Q1-E1-G10
ggcagcgccggcgtgacccacccgccatgctccccccagcgctcgtcttgctgttggggtttctctgccacgttgctatcgcaagacgaacctgccccaagccagatgagctaccgttttccacggtggttccactgaaacggacctatgagcccggggagcagataatcttctcctgccagccgggctacatgtcccggggagggatccggcggtttacatgcccgctcacaggactctggcccatcaacatcgctgaaatgcatgcccagactatgtccttttgctgggatcttagaaaactgaacggtacgctatacaacgtttgagtatcccaacaccatcagcttttcttgccacacggggttttatctgaaagggaccagttctgcagaatgcacctaagaaggga

SEQ ID NO: 13420 - DNA, 431 bp, Bos taurus
  unsure (397): unsure at all n locations; Clone ID: 57-LIB34-031-Q1-E1-G2
gttctgaaaccctagaggacgcaactatagcactgcagactccagtactagcctgtccagagcagcaagtgagaggaaacaagccagcattgtaagaggacatgcttctcctccctttctccgtgctgctcctgctcacacagccctggagatccctgggagcagaaatgacaaccttttctcagaaaatactggccaatgcctgtaccctggttatgtgtagccccctggagagtggcttgcctggtcatgatggacaagatgggagagaatgtccccatggagagaagggggatccaggttcaccaggacctgcagggcgagcaggaaggcctggatgggttggccctattgggccgaaaggagacaatggctttgttggagaaactggaccaanaggagacactggggcacgttggcctccaggtatg

SEQ ID NO: 13421 - DNA, 410 bp, Bos taurus
  Clone ID: 57-LIB34-033-Q1-E1-G2
tgatgaagggttctcataaaattcagtgtgttgatggagaatggacagctttacctgtgtgtattgaggaggagcgtacctgtgggaatatacctgaccttgatcacggggatgtcaagccttctgtccctccctatcaccatggagactcggttgagttcagttgcagagaagcatttacagtgaatgggcccatatttatcacgtgtattagtggagagtggacccaacctcctcagtgcattgcaacagatgaacttaggaagtgtaaacggtcaacattatttccacctgaggggagacaagcacataagattgaatatgaccataacaccaacagaagttaccaatgtcgaggaaaatcagaacaacgacactcaatctgtagaaatggacaatgggattctaaa

SEQ ID NO: 13422 - DNA, 345 bp, Bos taurus
  Clone ID: 57-LIB34-038-Q1-E1-G2
gagcgggcgataaagtatgttcttggaaatcctctgaccccaggagtcagtcaaggccctcaggattgataacagaacaattatgatccaaatacttgacctcattgaaagtgtggaagaatgacggggccaagctggaatgtggcagatgcccttgggggaatacaggctactttatccaacccacagttttctctgatgtgactgatgatatgcgcattgccagttatgagatatttggacctgtgcatcctatcatgaacttcaagtctttatatgatgtaatcatcagatcaaacggtactttctatgggtcatctgcatgaatatttaccaatgatattg

SEQ ID NO: 13423 - DNA, 357 bp, Bos taurus
  Clone ID: 57-LIB34-039-Q1-E1-G10
gtccacgcacgcgtccgaccagaactcctttactatgctaataaatataatggagtttttcaagaatgctgccaagctgaagataaaggtgcctgcctgctaccaaagattgaaactatgagagaaaaagtactgacttcatctgccagacagagactcaggtgtgccagtattcaaaaatttggagaaagagctttaaaagcatggtcagtagctcgcctgagccagaaatttcccaaggctgagtttgtagaagttaccaagctagtgacagatctcacaaaagtccacaaggaatgctgccatggtgacctacttgaatgcgcagatgacagggcagatcttgccaagtacata

SEQ ID NO: 13424 - DNA, 354 bp, Bos taurus
  Clone ID: 57-LIB34-039-Q1-E1-G2
cggacgcgtgggtgcccagaaagctcagaaggctaaatgaatattatccccaatacctgccaccccagtcttaatcagtggtggaagaacggtctcagaactgtttgtctcaattggccatttaagtttaatagtaaaagactggttaatgataacaatgcatcgtaaaaccttcagaaggaaaggagaatgtttttgtggaccatatgttttgtgtgtggcagtttaagttattagtttttaaaatcagtactttttaatgaaaacaacttgaccaaaaatctgtcacagaatttgagacccattaaaaaaagtttaatgagaaaaagagaaaaaccaaagggcggccgctct

SEQ ID NO: 13425 - DNA, 363 bp, Bos taurus
  Clone ID: 57-LIB34-040-Q1-E1-G10
caagccgccatagagagtggtacaatcaagccgtccacacttagagagcttgaacgttacgttctttcctgcctgcgaaagaaacctcggaagccgtatagtgagtatgaaatgagattcccaagttgcctgagcgaattcttgtgcggttctgaggacaagttagagaaggaggtgggggggtatgcttgatgcacttggaatcatcagttcctgggatgatgggttgcattagttgcttccttaagttcaagaaaggcatttgggaacaacaggggacagggaaaccggagtgctcctggctatgttagtcctggtttcttttcgtctctagctattaaaaagcctgtgggaaagacagag

SEQ ID NO: 13426 - DNA, 394 bp, Bos taurus
  Clone ID: 57-LIB34-041-Q1-E1-G10
gggtcgacgcacgcctctaaacgcagacatgccatccagactaaggaagacccggaaacttacgggccacgtgagccacggccacggtcgcatcggcaaacaccggaaacacccgggaggccgaggtaatgctggtggcatgcatcatcacaggatcaacttcgacaaatatcacccaggatactttgggaaagttggtatgaggcattaccacttaaagaggaaccagagtttctgcccgactgtcaaccttgataaattgtggaccttggttagtgagcaaacacgagtaaatgctgccaagaacaagacaggagctgctcctatcattgatgtggtgcgatcaggttactacacagttctggggaaatgaaagctcccaaagcagcctgtc

SEQ ID NO: 13427 - DNA, 309 bp, Bos taurus
  Clone ID: 57-LIB34-041-Q1-E1-G2
atgacttcaactggggatcatttggatactttaatacatcagcttaattcccactacctatacgaaactagtagatttatgtactatttgatgtctaacctatatttttttttctccacatagctaagtacacccactgtaaaaatggtcattcttattctttcattcagataagtcttttcctcatctggcacattaaggatacatgaaactatgttaacatttttggtaatgccttcaactggggatcattttaacttcgtgcagaaaagcttgagtaaaatacatagtggtttttttgtatgtcag

SEQ ID NO: 13428 - DNA, 354 bp, Bos taurus
  Clone ID: 57-LIB34-042-Q1-E1-G2
agtgatggacattgttcccactgacatccatcagaagtcgcccatcatcttggggtctcctgaagatgtgactgagttcctggagatatacaagaagcatgctgccaaatgaagagtgggcccagcccacaccaaatggaattgccttttatctggaccttttatctcacatagtgttaccacattccgactgttcaccatacattcctagtcatagaaataaaaagtatggctgttttcaccatcaaatgctctgtaatgcactacctaaccaaaatgctaaatcaataatgctacagggtcaagatatattctgagtggatagagaagagatgaacatatgtgtcctttttc

SEQ ID NO: 13429 - DNA, 336 bp, Bos taurus
  Clone ID: 57-LIB34-043-Q1-E1-G10
gtgagtccctactcaaccccggaggcgaaggacgcggtttctggaggcgaagaacgcggttggccaatcgcaagccagaagatgaaggttctgtgggttgccgtggtggtcgcgcttctggcaggatgccaggcggatatggagggagagctggggcccgaggagcccctgactacgcagcagccccgggggaaggacagccagccttgggagcaggcgctgggccgcttctgggattacctgcgctgggtgcagaccctgtctgaccaggtgcaggaggagctgctcaacacccaggtcattcaggaactgacggcgctgatggaggagaccatg

SEQ ID NO: 13430 - DNA, 398 bp, Bos taurus
  Clone ID: 57-LIB34-043-Q1-E1-G2
ctcacagcctaccctttgagatgttcagggcccaaagcaaaggcatttgcagtcttgctgtctatggttctgtgcacagtaatgctattcctcctacaactcaaattcctaaagcctaaaatcaacagctttatacctttgaagtgaaagatgcaaatggaagggtggtttctctggaaaagtttaaaggcaaagttgcactagttgtaaacgtggctagtgactgccaactcacagacagaaattacttagcactgcaggaactgcacaaagagtttggaccattccacttcagcgtcttggcttttccatgcaatcagtttggagaatcggagccccgcccgagcaaggaagtagtatcttttgcaagaaataacttcggagtaacattccccatc

SEQ ID NO: 13431 - DNA, 175 bp, Bos taurus
  Clone ID: 57-LIB34-044-Q1-E1-G2
agaaagccgctctggcagcgccggcgtgacccacccgccatgctccccccagcgctcgtcttgctgttggggtttctctgccacgttgctatcgcaggacgaacctgccccaagccagatgagctaacgttttccaacgggggtccaatggaaccggactaataaccccgggaac

SEQ ID NO: 13432 - DNA, 294 bp, Bos taurus
  Clone ID: 57-LIB34-045-Q1-E1-G10
atacaaacgcagatgaccccctagtgccagagattgcacggatctatagaacagacagagataagtacaacagaatatctcgggaatggactcagaagtatgccatgtgatgctaccttaaagtcagaataacctgcattatagctggaataaactttaaattactgttccttttttgattttcttatccggctgctcccctatcagacctcatcttttttagttttattttttgtttacctccctccattcattcacatgctcatctgagaagacttaagttcttcgagcttt

SEQ ID NO: 13433 - DNA, 346 bp, Bos taurus
  Clone ID: 57-LIB34-045-Q1-E1-G2
cagacatgagcagttcttctggttgatctacatgaccagcctggctgctgcaaaggaagaacccaccaaagggagtgactgaagacccactgcaggtgtgatagcagctctgcttctgtaacaaaagacgcactacatctcccactaaggccacgccattcttctgaggcctgcatttgccaatatttttaaacggagaacgagagaggaaggattctgtggtggtctgtgctagtccgggggggcacctgaactgaagcccagcagctggtttcaccacgaggaaagggctttttgaaacaggtcttccccttgggtcaagaaattggggtttaattaattttaa

SEQ ID NO: 13434 - DNA, 384 bp, Bos taurus
  Clone ID: 57-LIB34-046-Q1-E1-G2
catcaagtgtttgacaatggcagcatctagaaccctgagctgcttgagatcacataggaaactctgcattcacgcttcctgtacggcgtccgcaatgttgccagcgtgtgcctgcagattggatacccaaccgtcgcatctgtacgccattctatcatcaacgggtacaagcgcgtcctggctttgtctgtagagattgagtagaccttcccacttgctaaaaaggtcaaggttaacgcaaaggaggagtccgtggagtcagtctatgatatgggattcattctttttgactaatcactacgcaacagccaactaggccagcattatttgtgaaatgataaatgacacgcttagttctcttaaaaaagagctagttccgcaaaa

SEQ ID NO: 13435 - DNA, 433 bp, Bos taurus
  Clone ID: 57-LIB34-047-Q1-E1-G10
caattcggaggggttggctggtgtggtgtgttacacagagagtgcagctcctccaaaaaaggactcctttcaatgtgtgaatgggaaacgcattcctcagaagaaggcctgtgatggtgtcaatgactgtgtagacaagagtgatgagctgtgctgtaaagactgccgaggtgaaggttttctctgtaaatcgggtgtttgtattccaaagcagtataagtgcaatggtgagctggactgtatcacgggagaagatgaagttggttgtgaagaaactggacaccctgaaattaaagaagcagcagaaatgttgactgctgatatggatgcagaaagaaaatttacaaagtcatttttgcctaaactatcctgtggagttaaaaacaacatgcacattcgaaggaaacgagtcgtaagaggcaagccagcaaaa

SEQ ID NO: 13436 - DNA, 441 bp, Bos taurus
  Clone ID: 57-LIB34-047-Q1-E1-G2
gcctcgagcagggagctggtggctcttccatccccagaccagccaagcctgtgagtgacaccccagacagaggaaccagagccatgcggagtctcagcggactgctgttgttactgactgcctgcctggcggtaaacgccagctccgtgcccacattgcccgatgacattcaagtgcaggagaacttcgacctgtctaggatctatgggaagtggttcaatgtggccgtgggctccacctgcccatggctgaagaggttcaaggacaagatgaccatgagcacagtggtgttgaaagcggggccgacgagcaaggagatcagcgtcaccaacactcacaggcggaaaggtgtctgtgaatcgatctctggtacttatgagaagaacaggcactgatggggaagtttctcctatcacagagccaagtggaatatcaccatgg

SEQ ID NO: 13437 - DNA, 443 bp, Bos taurus
  Clone ID: 57-LIB34-048-Q1-E1-G2
acgcgtccggataattaatgagaaaagtcttaacatacaataactatatattcacatagtaaataacctctcttttgccttacacgatacataattttagtacaaaatttagattgtgaaatggatcatagatttaacaaaagctaatactctagaaattctggaaagaaatagaaattacagtcatgggatagagaaagattttctaaacagtgaattgtgaaaaaattattaattggaattaattaacattaatacttctgctctttgacagagagcaacacggaaatgaaaagtcatgtcacaggttggggaaaactatttgtaatacatattatctgacagagggcctatatttggaatatataaaatatgcttatagctcaataatgaaaacttagctttatacagctatcatgactcatcagactgtggacttaaaa

SEQ ID NO: 13438 - DNA, 407 bp, Bos taurus
  unsure (359): unsure at all n locations; Clone ID: 57-LIB34-050-Q1-E1-G10
ctccggatctgaaacactagaggacgcaactgtgagtgtctctgtcctagcctctcaacttgctttcctgtgtccaatagcactgcagactccagtactagcctgtccagagcagcaagtgagaggaaacaagccagcattgtaagaggacatgcttctcctccctctctccgtgctgctcctgctcacacagccctggagatccctgggagcagaaatgacaaccttttctcagaaaatactggccaatgcctgtaccctggttatgtgtagccccctggagagtggcttgcctggtcatgatggacaagatgggagagaatgtccccatggagagaagggggatccaggttcaccangacctgcaggacgagcaggaaggcctggatgggttggccctattgggc

SEQ ID NO: 13439 - DNA, 432 bp, Bos taurus
  unsure (395): unsure at all n locations; Clone ID: 57-LIB34-050-Q1-E1-G2
atcagtcatacagtggatactttccagcacgtgtaaatcaacagtttctctataactgtgatcagtattttgtgcctccttcactatattcctcggattacctgacttgcacagcagaaggatggtttccagaagaaccatgccttagagaatgtattttcaataatttggaaaatggatataccccaagtagtgaaagaaaagctgtacagggtgaaacagtaagggttcgctgctattatggctacagtcttcaaaataatcagaacacaatgacctgcacagagagtggctggtctcctcctcccagatgcatccgtgtcaaaaatactggatgttctcaaccacctcaaatagaccatggaaccattaactcatctagctctgcagaaganaggagagaaatacatgaacaaaggctgtatgcacatg

SEQ ID NO: 13440 - DNA, 246 bp, Bos taurus
  Clone ID: 57-LIB34-051-Q1-E1-G10
ctcgcaccctccgagtgtaatcttctacattctttcattgctttcttcagcatgcctggcatatgttgctacccgagacaactgctgcatcttagatgaaagatttggtagttattgcccaactacctgtggaattgcagatttcctgaataattaccaaaccagtgtagacaaagatctacgaactttggaaggcatcttatatcaggttgagaacaaaacatcagaagccagagagctggtcat

SEQ ID NO: 13441 - DNA, 235 bp, Bos taurus
  Clone ID: 57-LIB34-051-Q1-E1-G2
gatcttagtgggtaagactggggcaggaaaaagtgcaacaggaaacagcatcctcagagagaaagtgtttctgtctagcttttcggctgtatccatcaccaagcactgtgagaaaggaagcagcacctggaaggggagagaagttgtcattgtggacacacctggcctctttgacacggaggccccagatgctgagactcacaaggagattacccgctgcatggtgctgacttcc

SEQ ID NO: 13442 - DNA, 242 bp, Bos taurus
  Clone ID: 57-LIB34-054-Q1-E1-G2
gtcttccctgacagagaccatagaaggagttgatgccgaggatggacatagcccaggggaacaacagaagagaaagattgtcctggacccctcaggctccatgaacatctacctggtattggatggatcagacagcgtgggggcccacaacttcacaggggccaagaattgtctcagagatttcatcgagaaggtggcaagctatggggtgaagccaaaatatggtctagtgacatatgcca

SEQ ID NO: 13443 - DNA, 350 bp, Bos taurus
  Clone ID: 57-LIB34-055-Q1-E1-G10
tacacacaagagtgagattgctcatcggtttaaagatttgggagaagaacattttaaaggcctggtactgattgccttttctcagtatctccagcagtgtccatttgatgagcatgtaaaattagtgaacgaactaactgagtttgcaaaaacatgtgttgctgatgagtcccatgccggctgtgaaaagtcacttcacactctctttggagatgaattgtgtaaagttgcatcccttcgtgaaacctatggtgacatggctgactgctgtgagaaacaagagcctgaaagaaatgaatgcttcctgagccacaaagatgatagcccagacctccctaaattgaaaccag

SEQ ID NO: 13444 - DNA, 352 bp, Bos taurus
  Clone ID: 57-LIB34-055-Q1-E1-G2
aggctttcctcgcgtcaccgccgggatgaagccgatcttgctgcagggccatgagcggtccattactcagattaagtacaaccgcgagggagacctcctcttcacggtggccaaggaccctattgtcaatgtatggtactctgtgaatggtgagagactgggcacctacatgggccataccggagctgtgtggtgtgtggacgcggactgggacaccaagcatgtcctcactggctcagctgacaacagctgtcgtctctgggactgtgaaacagggaagcagctggccctgctcaagaccaattcagcagtccggacctgtggctttgactttgggggcaacatcatcatg

SEQ ID NO: 13445 - DNA, 326 bp, Bos taurus
  Clone ID: 57-LIB34-056-Q1-E1-G2
gctaatcgagagtgtttgacccccttaaggatcgtgtgggataaccgcacaggtcaatcaactggaatcgtgagtaattcaagaaacgtggcgagtacgggttcgaacacgcgcgcacacatcgttacaccagcaaagtagaccgagtgtcatcaccgagtctcgaggaggtttcaagacgcctacgaaccatgggtacaacgtgtggtataaaggcggccacagcgagactgcactgtactgaagaccatctgaacttgatcatgcaccagttgcgcgtgccacatggcaagatagcattgcatgattgagtcgccacatgcgga

SEQ ID NO: 13446 - DNA, 221 bp, Bos taurus
  Clone ID: 57-LIB34-057-Q1-E1-G10
gtgagagagagatggctggagacaacaaacttcttggacagtttactttgattggaattcccccagcccctcgtggagtccctcagattgaagttacatttgacattgatgccaatgggattgtacatgtttctgccaaagataagggtacaggacgcgagcagcagattgtgattcagtcttctggtggattaagcaaggatgatattgaaaatatggtt

SEQ ID NO: 13447 - DNA, 227 bp, Bos taurus
  Clone ID: 57-LIB34-057-Q1-E1-G2
acgctcagtgtaatgtcaacatcgcaagcctccgcttagcaatttctgcagaaagcatccctaaaggcactcagcaagacaccaccaaactgaccgcatcaaagagaaatttcatcatctacagagggctcctcttcaggtgttcctgcaaagcttggtgtgaagacagctttccaggcttacgtgtcttgcatgatgttcctgctgcaaggtgcccagatgctgca

SEQ ID NO: 13448 - DNA, 224 bp, Bos taurus
  Clone ID: 57-LIB34-058-Q1-E1-G2
taactgcagactttgctgaggataacgggggaacattgttaagaagtgccttgagctcttctctgagctagcagaagacaaggagaactataagaaattctatgaggcgttctctaaaaacctgaagcttggaatccatgaggactccactaaccggcgacgcctttctgagctgctgcgctatcacacgtcccagtctggagacgagatgacttctctctcag

SEQ ID NO: 13449 - DNA, 211 bp, Bos taurus
  Clone ID: 57-LIB34-059-Q1-E1-G2
cggacgcgtgggattattattcatctataattacccactatgatgctttaaagctgtacttgcatttcaaagctcataaaacctaaaaggagatttcagattagaaataagaatgtgctccatgttttcaacagatctcttcctgtttgtgtttcacagaaattgggatatattacacttatttcatagttttcgtttttggaagaaaaca

SEQ ID NO: 13450 - DNA, 317 bp, Bos taurus
  Clone ID: 57-LIB34-060-Q1-E1-G10
caggaagtggagacgcaacacctgccctctacacttgtggaaggttaagctgaaacggcagctcagcttcggagatgttaccgtccaaattgcatgcgcttttctgcctctgcacctgccttgcactggtttatccttttgactggcaagacctgaatccagttgcctatattgaatcaccagcatgggtcagtaagatacaagctctgatggctgctgcaaacattggtcaatctaaaatccccagaggaaatggatcttattccgtcggttgtacagacttgatgtttgattacactaataagggcaccttcttg

SEQ ID NO: 13451 - DNA, 239 bp, Bos taurus
  Clone ID: 57-LIB34-060-Q1-E1-G2
attggtaccctttatctactatttggtgcttgggccggtatagtaggaacagctctaagccttctaattcgcgctgaattaggccaacccggaactctgctcggagacgaccaaatctacaacgtagttgtaaccgcacacgcatttgtaataatcttcttcatagtaataccaatcataattggaggattcggtaactgacttgttcccctaataattggtgctcccgatatagcatt

SEQ ID NO: 13452 - DNA, 425 bp, Bos taurus
  Clone ID: 57-LIB34-061-Q1-E1-G10
ttcccggaggcccccacgcgtccgacaaaactttggcacaatgaagtgggtgacttttatttctcttctccttctcttcagctctgcttattccaggggtgtgtttcgtcgagatacacacaagagtgagattgctcatcggtttaaagatttgggagaagaacattttaaaggcctggtactgattgccttttctcagtatctccagcagtgtccatttgatgagcatgtaaaattagtgaacgaactaactgagtttgcaaaaacatgtgttgctgatgagtcccatgccggctgtgaaaagtcacttcacactctctttggagatgaattgtgtaaagttgcatcccttcgtgaaacctatggtgacatggctgactgctgtgagaaacaagagcctgaaagaaatgaatgcttcctgagcc

SEQ ID NO: 13453 - DNA, 422 bp, Bos taurus
  Clone ID: 57-LIB34-061-Q1-E1-G2
acgggaaaggataaatcttcagacataaaagtgcaaacaaaatggaaaagaggagcacagggaaaacatgcggaagtggccaaccaggagactaaagaagacttacctgcagaaaatggagagactaaaaacgaggagagcccagcctctgatgaagcagaagagaaagaagccaagtctgattaataaccacataccgagtcctgtcagtggtccctgtttcccttcttgtacaatccagaggaatatttttatcaactattttgtaaatgcaagttttttagtagctctagaaacatttttaaaaaggagggaatcccacctcatcccattttttaagtgtaaatgcctttttttaagaaggtaaatccatttgctggttgttaattttttggtacaaccagaaaatattgggatattgg

SEQ ID NO: 13454 - DNA, 209 bp, Bos taurus
  Clone ID: 57-LIB34-062-Q1-E1-G10
attcggtaactgacttgttcccctaataattggtgctcccgatatagcatttccccgactaaataatataagcttctgacgcctcactccctcattcctactactcctcgcatcctcgatagttgaagctggggcaggaacaggctgaaccgtgtaccctcccttagcaggcaacctagcccatgcaggagcttcagtagatctaacca

SEQ ID NO: 13455 - DNA, 192 bp, Bos taurus
  Clone ID: 57-LIB34-062-Q1-E1-G2
cgctaaggcaggagacttcctcgaaaaccactacagagagttgcgaagaccatatactgtggccattgctgcctatgccctggctttgttgggcaagctggagggtgaccgcctcaccaaatttctgaacacagccaaagaaaagaaccgctgggaggaacccaaccagaagctctacaatgtggaggccac

SEQ ID NO: 13456 - DNA, 406 bp, Bos taurus
  Clone ID: 57-LIB34-064-Q1-E1-G2
gcgtccgaggctgagtgcatcccatatctaccaagagccccgacttggagcctgttctgagatatgccatccaatattttaacaacaacaccagtcattcccacctctttgatctgaaagaagtaaaaagagcccaaagacaggtggtgtctggatggaactatgaagttaattactcaattgcacaaactaattgttccaaggaggaattttcattcttaactccagactgcaagtccctttcaagtggtgatactggtgaatgtacagataaagcacatgtagatgtcaagctaagaatttcttccttctcgcagaaatgtgacctttatccaggggaggattttttaccccccatggtttgtgtcggctgccccaaacctatacctgttgacagcccaaacct

SEQ ID NO: 13457 - DNA, 229 bp, Bos taurus
  Clone ID: 57-LIB34-065-Q1-E1-G2
tcgacccacgcatccgggaacctgggttgaaggtgtacgggggtgatgaccggattggggccctgactcacaaggtcacacacctgtccacactgcaggtggggtctctccatgtcaagtgcctgtcgacgccgtgtcacacttccggacacatctgttactttgtgaccaagcccaacagtcccgagccgcccgctgtgttcacaggtgacaccttgtttgtggccgg

SEQ ID NO: 13458 - DNA, 203 bp, Bos taurus
  Clone ID: 57-LIB34-066-Q1-E1-G10
ggcggctctctggaggctaagtgtcctctgcggcgccagagaagggcgagctctgttcctccgaaccccagtggtcagaccagctcttgtctcagcatttctccaggaccgacctgctcaaggatggtgtggaacacagcatattcacctgtcacccagccaccattctggttccaaggctgcatctctccactggactggtg

SEQ ID NO: 13459 - DNA, 265 bp, Bos taurus
  Clone ID: 57-LIB34-066-Q1-E1-G2
ctcgttgcagactggtgttaatgagtatatataacagttaaaaaaaaagttggtattttataagcacagacaattctaatggtaacttttgtagtcttacgaatagacgtaaattgtaatttgggaatataaaaactactgaataaatcatgtggcctaatattgaaaatgtcactgttataaattttgtacattttcgatcaaatgtacacctcccctttgctaacaaccgtctgctctcaaggatgttgtgggtttgatttct

SEQ ID NO: 13460 - DNA, 200 bp, Bos taurus
  Clone ID: 57-LIB34-068-Q1-E1-G10
ggtggctcttccatccccagaccagccaagcctgtgagtgacaccccagacagaggaaccagagccatgcggagtctcagcggactgctgttgttactgactgcctgcctggcggtaaacgccagctccgtgcccacattgcccgatgacattcaagtgcaggagaacttcgacctgtctaggatctatgggaagtggta

SEQ ID NO: 13461 - DNA, 215 bp, Bos taurus
  Clone ID: 57-LIB34-068-Q1-E1-G2
agaaaaaatatcaattcgatgtgaagaaaactatttaattcacgatgcagacgaaattgtgtgcaaggatgggagatggcagtcaatcccacgatgtattgaaaaaattggatgttctcaagcacctcaaatagaccatgggaccattaactcatctagctctgcagaagaaaggagagaaatacatgaacaaaagctgtatgcacatggcacta

SEQ ID NO: 13462 - DNA, 142 bp, Bos taurus
  Clone ID: 57-LIB34-069-Q1-E1-G2
gagcgcctgggcatcgccctggggggcccccctactcccaccccgagtctctggtgcccccagcctgcaggaggccctgccgctgccccagctgtcctcctggtgggccctagcttaataaagatttctcaagcttcatggc

SEQ ID NO: 13463 - DNA, 239 bp, Bos taurus
  unsure (226),(231)...(232): unsure at all n locations; Clone ID: 57-LIB34-070-Q1-E1-G10
tcgccatacgctccctgcacttcgggtctgcttgctccagcccgctctgccgccgccgccgtcgccgccatggcccaagctgacattgccctgattggactggctgtcatgggccagaacttaattttgaacatgaatgaccatggctttgtggtctgtgcttttaataggacagtctccaaagttgatgacttccttggccaacgaggcgaagggcaccaagggntgctnntggtgct

SEQ ID NO: 13464 - DNA, 230 bp, Bos taurus
  Clone ID: 57-LIB34-070-Q1-E1-G2
atggcgggctgtgtggcccggcgggccctgaccgtgggcagtcgttggtggtcccgatcgctgactgggacccgggggccgaggccgctctgtgcggcgggtggagctggggccttcccacccgtggcgaccacgacgacgcggaggcacctctcgtcccgaaaccgaccagagggcaaagttttggagacagttggtgtgttcgaggtgccaaaacagaatggaaaata

SEQ ID NO: 13465 - DNA, 386 bp, Bos taurus
  Clone ID: 57-LIB34-075-Q1-E1-G10
ttaggatcagacaaatgtgtctgctgctgcccagagaagaaaaatgtgcctctttgcaggcttccaacgaaaagctgttgtagtttgcccaaaagatgaagactataagcaaagaacacagaagaaagcagaagtagagggaaaagacctaccagaacatgcagttctcaaaatgaaaggaaactttactctgccagaagtagctgagtgctttgatgaaataacctatgttgaacttcagaaggaagaagcccagaaacttttggagcaatataaggaagaaagcaaaaaggctcttccaccggaaaagaaacagaacacaggctcaaagaagagcaataaaaataagagtggcaagaaccagtttaacagaggtggtggccata

SEQ ID NO: 13466 - DNA, 323 bp, Bos taurus
  Clone ID: 57-LIB34-075-Q1-E1-G2
tattaacaccatgctgagctgtctgttgggtatataattgtctttaatgtttacaatctgattacatggcggtcgtttaatgtgctcatctttcagacccaaattgtctgatgtaaggatgggtgtcattgggtcaattcttgtgctgcgtcatctaattgaatcagcaaattttgcatatttctagtgtaggttgtttcttttttttaagaacgcccaggcataatagcgtactcatttctaataattgttctacaatctcacagtcagatagatcataaatgcaaaaaatggcctccaagacctataagtgatactctatc

SEQ ID NO: 13467 - DNA, 291 bp, Bos taurus
  unsure (20)...(21),(55),(61): unsure at all n locations; Clone ID: 57-LIB34-077-Q1-E1-G10
atagtacgtcgtataaacgnnttgtgcgcgctctgggtcctggtggggacctggngccagngcatctgcccgggaagctgcgggcagagcttgaggccgcgctaggaaagaagcacaagggcggcaatcgcccggctcgcctggtttctttccgcctgatccgggatctgcatcagtacttgagagaaaggggttccaaactgtaccttcatgagctcctagaaggcagtgaaatctatcttccagaggttgtgaagcctcctcggaaaccagagctaattgctcgtcggg

SEQ ID NO: 13468 - DNA, 436 bp, Bos taurus
  unsure (11): unsure at all n locations; Clone ID: 57-LIB34-078-Q1-E1-G2
aatgctgccangctgaagataaaggtgcctgcctgctaccaaagattgaaactatgagagaaaaagtactgacttcatctgccagacagagactcaggtgtgccagtattcaaaaatttggagaaagagctttaaaagcatggtcagtagctcgcctgagccagaaatttcccaaggctgagtttgtagaagttaccaagctagtgacagatctcacaaaagtccacaaggaatgctgccatggtgacctacttgaatgcgcagatgacagggcagatcttgccaagtacatatgtgataatcaagatacaatctccagtaaactgaaggaatgctgtgataagcccttgttgggaaaatccactgcattgctgaagtagaaaaagatgccatacctgaaaacctgcccccattaactgctgactttgctgaagat

SEQ ID NO: 13469 - DNA, 431 bp, Bos taurus
  Clone ID: 57-LIB34-079-Q1-E1-G2
agaagttttggggaaaatacctatacgaaattgctagaagacatccctacttttatgcaccagaactcctttactatgctaataaatataatggagtttttcaagaatgctgccaagctgaagataaaggtgcctgcctgctaccaaagattgaaactatgagagaaaaagtactgacttcatctgccagacagagactcaggtgtgccagtattcaaaaatttggagaaagagctttaaaagcatggtcagtagctcgcctgagccagaaatttcccaaggctgagtttgtagaagttaccaagctagtgacagatctcacaaaagtccacaaggaatgctgccatggtgacctacttgaatgcgcagatgacagggcagatcttgccaagtacatatgtgataatcaggatacaatctccagtaaactg

SEQ ID NO: 13470 - DNA, 283 bp, Bos taurus
  Clone ID: 57-LIB34-081-Q1-E1-G10
gacccacgcgtccagcctcccaggccctgggcattgcccaggccgccctggactgtgctgtgacctacgcggagaaccgcagtgctttcggggcgcccctcaccaagctgcaggccatccagttcaagttggcggacatggccctcgccctggagagtgcccggctgctgacctggcgcgctgccatgctgaaggacaacaaaaagcctttcaccaaggaggcggcaatggccaagctggctgcatcggaggccgcaactgccatcacccaccaagccatgca

SEQ ID NO: 13471 - DNA, 435 bp, Bos taurus
  Clone ID: 57-LIB34-082-Q1-E1-G2
ctgacctaggacagtgaatcgataatggcactctccatcacgcggggccttctgctgctggcagccctgtgctgcctggcccccatctccctggctggagttctccaaggacacgctgtccaagagacagatgatacatcccaccaggaagcagcatgccacaagattgcccccaacctggccaactttgccttcagcatataccaccatttggctcatcagtccaacaccagcaacatcttcttctcccccgtgagcatcgcttcagcctttgcgatgctctccctgggagccaagggcaacactcacactgagatcctgaagggcctgcgtttcaacctcactgagctcgcagaggctgagatccacaaaggctttcagcatcttctccacaccctcaaccagccaaaccaccagctggcaactgacactggc

SEQ ID NO: 13472 - DNA, 196 bp, Bos taurus
  unsure (22): unsure at all n locations; Clone ID: 57-LIB34-083-Q1-E1-G2
agggtatgccgccgggacacangtgtcgtgaaaaccaccgttaaacctaagccaaaatgggaaaggataacacccacatcaacatcgttgtcattgggcacgtagattcagggaagtctaccacgactggccatctgatctataaatgtggcggtatcgacatgagaacacttgacacgttcgagaaggacgctgc

SEQ ID NO: 13473 - DNA, 428 bp, Bos taurus
  unsure (205): unsure at all n locations; Clone ID: 57-LIB34-084-Q1-E1-G10
aacagggtggaggtgggggagggtgtgcaaaaactaacattgaaattttgaaacagcagcagagtgagtgaattttaatttttgttcattgttggtggtttaaagaagtccccccatgtaattattgtgaacactttgctttgtggtcactgtaacatttggggtggtgggacagggaggaaatgtaacagtagtccatatgtcnctggcatctattcagagcagtgtgcagaatgtaatgctcttttgtaagaaacgttttatgatttttaaaataaatttagtgaacctatttttggtggtcattttttttaagatggtcatttttcaaatggctgaattccctccaacctacccccaaacggaacactaagtttaattttcagtcctctgttggatataaataaatggcatctcttcttggactt

SEQ ID NO: 13474 - DNA, 282 bp, Bos taurus
  Clone ID: 57-LIB34-084-Q1-E1-G2
gggtcgacgcccgcgtccggagcaattcttctggttgatctacatgaccagcctggctgctgcaaaggaagaacccaccaaagggagtgactgaagacccactgcaggtgtgatagcagctctgcttctgtaacaaaagacgcactacatctcagaagagaatggccctttaccagggagcagcctttttcatgctggtagcgtcctgtgtttgcagcactgtcttccacagagagcagcagacttggtttgagggcgtcttcctgtcttcaatgtgccctg

SEQ ID NO: 13475 - DNA, 418 bp, Bos taurus
  Clone ID: 57-LIB34-085-Q1-E1-G2
gacccaggcgtcaacggacgcgagggttcatatgttttttatcatcatgacaacacaaccatatgaaccatgatagagagcttaggaaaaggtttatatgttttttatcatcatgaaaacacagccatcaggaccagctaacagccagtaagaggtcggtaatctcagcgtgtggcttataaatggaatacagagaccctcttccatccacatttacttttcatccagataaaatgcatggcgaaccagaagtttgaggtcaggtctgagtgttggggcgagctgagtgacgttagagcctcactgctgtgagcccagtcgtggtgtggaattctgtggaacaccaccccagctcggctcagaacttggggatgggggtttcgttgccttctttactctgcggttgaacctgtgacac

SEQ ID NO: 13476 - DNA, 398 bp, Bos taurus
  Clone ID: 57-LIB34-086-Q1-E1-G10
acgcgtcaggagaaaaggatgctgctgttcccatcccagttaaatgctgtcaacccgtggagaagcaagccttatttcaactccctaagatccttttgaaaaaataatctctctaggcttctttgatttcctttcagaagcaattgctgtctttcttactgtgactttgttgctgtgtaagattgaagatataaatgaatattattgtgagataaaaagtcagtgtgaaaattcattgacgatactttaaaatgtcatctttgcttgtaccagatttcttactttgaatttttaaaaatcactttcccatttaaagttttataatgactacatttattttaaaatagctaactctgtgattttacattctattgtaattcacaagcatttagatcctt

SEQ ID NO: 13477 - DNA, 457 bp, Bos taurus
  Clone ID: 57-LIB34-086-Q1-E1-G2
ggcaaggttgactcagaggccctggtggactgcctgcggcacaagaatgaagaggaggttctggccatcaacaagctcgtcaagatcatccccggcgtggtggatgggatcttcctgcccaagcaccccctggagctgctggcctctgacgactttcaacctgtccccagcatcattggtgtcaacaatgatgagtatggttggatcatccccttgagcgtgaacaattctgacactaggagggaaataagcagagagtccgtgaggaatgccttgcaggaattgtcaacaatgacgactatgcctcctgagtttggtgagctgttgatggaggagtacatagaggacagtgaagaccaccagaccctccaaaaccagctccatgagattatgggggactacctttttgtgattcctgcactccaagtaacaatgtttcatcgttcccacgcccccg

SEQ ID NO: 13478 - DNA, 256 bp, Bos taurus
  Clone ID: 58-BOVMS1-001-Q1-E1-G6
aaaaaattcctggaggagctgctgaccactcagtgtgaccgcttctcccaggaagagatcaagaacatgtgggctgccttcccccccgacgtgggcggcaacgtagactacaagaacatctgctacgtcatcacgcatggtgacgccaaggaccaggagtagagcgggcccttttcggtctctgctaatcaacaccttcctgccagtccgacctccccacccagactcctaataaattgaaagggtctcatttctt

SEQ ID NO: 13479 - DNA, 387 bp, Bos taurus
  Clone ID: 58-BOVMS1-002-Q1-E1-G6
cctaactgacagtatttattcagtacgtcatcacaaaccatataatacaacaacaattgcaacgttttatatttattgctgggtctcagactgatagtgaggaaataacatcatgggccaagcattacagtagtgatgttttcattgtgatctggctgcttaaaaaagtggtctacatgttaagaccacttctcatagacccagcttgcttcttatagacccagcttggttcttctccaatgtcttctcttggagttgtacctgattttattgccagttttcattcgaatccattgaggaatgggacgattctgcttttgtttcttggccaggaatcgcttgatcctgaaagtcttgtgagagttctagatcgcgagcggccgctct

SEQ ID NO: 13480 - DNA, 430 bp, Bos taurus
  Clone ID: 58-BOVMS1-003-Q1-E1-G6
acctactaggcctattaccccattcattcacaccaacaacacaactatcaataaacctaggcatagccatccccctgtgagcaggagccgtaattacaggattccgcaataaaactaaagcatcacttgcccatttcttaccacaaggaacacccaccccactaatcccaatactagtaattattgaaactatcagcctttttattcaacctatagccctcgccgtgcggttaacagctaacatcactgcaggacacctattaattcacctaatcggaggagctacacttgcactaataagcattagcactacaacagctctaattacattcaccattctaatcctactaacaattctagagtttgcagtagctataatccagcctatgtattcactctcctagtcaggctatatctgcatgacaacaca

SEQ ID NO: 13481 - DNA, 346 bp, Bos taurus
  Clone ID: 58-BOVMS1-004-Q1-E1-G10
atgcaacaggggtagctcttctatagggtcacctaaattcaattcactggccgtcgttttacaacgtcctgactgggaaaaccctggcgttacccagcttaatcgccttgcagcacatcccgctttcgccagctggtgtaatagctaaaaggcccgcaccgatagcccttctcaacagttgcgcatcctgaatggcgaatgggacgcgctctgtatcggcacattaagcgcagcgggtgtggtggttacgcgcagcgtgaccgctacacttgccagcgccctagcgcccgctcctttcgctttcttcccttcctttctcgcaacgttcgccggctttccccgttaa

SEQ ID NO: 13482 - DNA, 255 bp, Bos taurus
  Clone ID: 58-BOVMS1-004-Q1-E1-G6
ccacgcgtccgaaggagtgcaattatgattgagttttctgaagatgggatgccgctgctaaaagatccatgcttgcctactcatacgtccgacgtcgttgttctcctacactgtcatccacattcatgtcaatggcagtcgttttacagtgtcatgactggtaaaaccctggcgttaggcaagttaatcgccttccaacacatccacctttcgatatctggtctagactttctcaggccagcaacagtttccctt

SEQ ID NO: 13483 - DNA, 227 bp, Bos taurus
  Clone ID: 58-BOVMS1-006-Q1-E1-G10
atgcgacgtcatatctcttctatagtgtcacctaaattcaattcactggccgtcgttttacaacgtcgtgactgggaaaaggggggcgttacccaacttaatcgccttgcaccacatcgccctttcgccagctggcgtaatagcgaagaggcccgcaccgatcgcccttcccaacagttgcgcatcctgaatggcttatgggacacgccctgtatcggcgcattaag

SEQ ID NO: 13484 - DNA, 424 bp, Bos taurus
  Clone ID: 58-BOVMS1-006-Q1-E1-G6
cgcgtccgcatgaggccgcccttttttttttttttttttttttttttttttttttttttttttttttttttttttttttttttaggagcctcatcaatagatagaaacatagaggaaaagtcagactacgtctacgaaatgtcagtatcaggcagcggcttcaaagccgaagtggtggttagaagtaaaatgaaattttaattggcggaagaagcagacaattaagaaggtggacccaatgatgacgtggaggccgtggaagcctgtggctacaaaaaaagttgagcccgtaaatccgttcgggaaagtaaaaggggcttcaaaataatccgagggtttgtacaatgttaaattaacccccaatgtgaagggggaaaaaaagggttggaataaaagctggcggccctttttttttttttttttt

SEQ ID NO: 13485 - DNA, 381 bp, Bos taurus
  Clone ID: 58-BOVMS1-007-Q1-E1-G6
aatatttttcttgtgcaggccatgttttaattgtcctttttcttcatgcaggatgacctgagattcagatcgtactccataaagtagaatatatgatagcaagtcaacgagactgcgatgctacatgctacatttaagctacttttatgcatgcttgctttgggatggggaatcgatcattcagtatttacataccgttttaacattatatgtcttatcatgtacagcttttagcacgagaattgtgaggtaccttacttacttccatgcatacaagtctaacattaccgttttgtataccatggacacatttaatacatctaggagcatttctagtgatgtgttgctcctaacttctcgttgtatatagatgaagcacct

SEQ ID NO: 13486 - DNA, 403 bp, Bos taurus
  Clone ID: 58-BOVMS1-008-Q1-E1-G10
accacgcgtccatttatttttttttttttttttttttttttttttttttttttttttttttttttttttttttttttttttttttttttttttttttttttttttttttttttttttttttttccccaaagggggtaatggggaccggaaaaaccccaaagtgggggggaaaaaaaattccgggggaaaaaaaacccccaaaggggccaaagggcggggggccaaaaggggaaatgaaacccaccccggggggaacaaaatttttaaaaaaaaaaccaaaaagacccggaaaaattcaaccccaaaaagttccccagaacccacaaaaagtttgggggccaacccaaacaaggggaaaccccaaaaaaaaacccaaaaccccaaaaaaagaaaaccggggggg

SEQ ID NO: 13487 - DNA, 420 bp, Bos taurus
  Clone ID: 58-BOVMS1-008-Q1-E1-G6
aggcactgtgttccactcatggtgatggatgcttgggcaaatgttggtgccttttgtgtcacaatgttaagatgctaatgttttaatcgaaataagcactgatcttaaaatatgaagatgttagcttttctcgtaggaaattttctgtcataaaaccggcatcaagaatcactgaagagctgacaacgatggtccttccaagtcaagattttatcctggttggaaagggaggccatctccggttgagagaatagattggttggaagcttaacttacctgctgtcagcttttaaggtaatttgactgtgaaagcatcaattttctggacagaaaagggaaaagtattaaactggttttaaaaaaaataagtttaatgtctgtcatatcacaaattagtgttaaaacactaaaactgtaacc

SEQ ID NO: 13488 - DNA, 462 bp, Bos taurus
  unsure (20): unsure at all n locations; Clone ID: 58-BOVMS1-009-Q1-E1-G6
gtccggcctaccgggtcggngccccacgcgtccgtacaactaggattccaagatgcaacatcaccaatcatagaagaactacttcactttcatgaccacacgctaataattgtcttcttaattagctcattagtactttacattatttcactaatactaacgacaaagctgacccatacaagcacgatagatgcacaagaagtagagacaatctgaaccattctgcccgccatcatcttaattctaattgctcttccttctttacgaattctatacataatagatgaaatcaataacccatctcttacagtaaaaaccataggacatcagtgatactgaagctatgagtatacagattatgaggacttaagcttcgactcctacataattcaaacatcagaattaaggcaaggggagctacgactattagaattcgataatcgatttgtactaccaatagaa

SEQ ID NO: 13489 - DNA, 335 bp, Bos taurus
  Clone ID: 58-BOVMS1-010-Q1-E1-G10
cggtccggatgccgggtcgaccagcgtccgagacacgtgggaaaataataaaaaaaaaaaaaaaaatataaaaaataaaaaaaaaaaaaaaaaaaaaaaaaaaaaaaaaataaataaataaaaaaaaaatttaaaagtaagtgaaaataaggggtaaattaattgatttttaataaaaattaattattttttattaattttaaatttttttgggggggtctttcaggggttttaatttttttttagtgttttttggttttttttattttttttatttttccattatttttttttttagtgctttttttttttagttttttttttggaaaattttt

SEQ ID NO: 13490 - DNA, 342 bp, Bos taurus
  Clone ID: 58-BOVMS1-010-Q1-E1-G6
cgaatattatttccgggtctttgctgaaaacatgtgtggcctcagtgaagatgcaacaatgacaaaagagagtgccgtgattgccaaggatggcaaaatctacaaaaatccagtgtatgaagacttcgatttcacagaggcacctatgtttactcagccattggtcaacacctatgctgtagctggttacaatgctacgctgaactgcagtgtgagaggaaatcctaagcccaaaattacctggatgaagaacaaagttgttattaaggatgatccaagatacaggatgttcagcaaccaaggggtctgtactctggagattcgcaaagccagcccctatga

SEQ ID NO: 13491 - DNA, 403 bp, Bos taurus
  Clone ID: 58-BOVMS1-013-Q1-E1-G6
tcatcaggcgatggtcgcgctcgaagatctaggcttacctacgcatgcatgcgacgtcatagctcttctatagtgtcacctaaattcaattcactggccgtcactttataacgtcttgaccgtgaaaagcctgacgttacacatcttaatcgccttgcagcacatggacctttcgcgatctggagtaattacgactcggcccgcaacgctctgccgtcgcaataattgctcatcccggatggcgaatgggaatcgccctgtaccagcgcatttagctcagcgggtgtggtggatacgcgcaacgtgaccgctagacttgccaacgccctaatgcaccgctcagttcgctttcatcgaatcctttctcgccacgttcgccggctttccccgtcaatctctaaat

SEQ ID NO: 13492 - DNA, 362 bp, Bos taurus
  Clone ID: 58-BOVMS1-014-Q1-E1-G10
atgcgacgtcatagctcttctatagtgtcacctaaattcaattcactggccgtcgttttacaacgtcgtgactgggaaaaccctggcgttacccaacttaatcgccttgcagcacatccccctttcgccagctggcgtaatagcgaataggcccgcaccgatcgcccttcccaacagttgcgcagcctgaatggcgaatgggacgcgccctgtagcggcgcattaagcgcggcgggtgtggtggttacgcgcagcgtgaccgctacacttgccagctccctatcgcacgctcctttcgctttcatcccttcctttctccccaggttcgccggctttccccgtcaatctccaaatcgggggct

SEQ ID NO: 13493 - DNA, 322 bp, Bos taurus
  Clone ID: 58-BOVMS1-014-Q1-E1-G6
ccatgtttgaccagtcccagattcaggagttcaaggaggccttcaacatgatcgaccagaacagggatgggttcattgacaaggaagacttgcatgacatgcttgcttccctgtgaaaaaatccaactgatgagtatctggatgccatgatgaacgatgctccatgtcccataaatttaccatgttctcaaagtttgtgaaattaatggacaatcagagatgtatcagaaatgcttttgcatgctttgatgaagatacaactggaccattcacgaggattacctgagagaactgctgaccacaatgggagaccggtttacag

SEQ ID NO: 13494 - DNA, 405 bp, Bos taurus
  Clone ID: 58-BOVMS1-017-Q1-E1-G10
aaaggttggaagacctgtttgatatgtgcagacacattcagagcaggggcttttgaccaactaaaacagaatgcaaccaaagcaagaattccattctatggaagctatacagaaatggatcctgttatcattgcctctgaaggagtggaaaaattcaaaaatgaagactttgaaattattattgttgatacaagtggccgtcataaacaagaagactctttgtttgaagaaatgcttcaagttgctaatgctatacaagcagataacattgtttatgtgatggatgcctccattggacacgcttgtgaagcccacgctaaggcttttaaagataaagtagatgtagcctcagtaatagtgacaagacttgatggccatgcaaaaggatgtggtgctcttagtgca

SEQ ID NO: 13495 - DNA, 439 bp, Bos taurus
  Clone ID: 58-BOVMS1-017-Q1-E1-G6
tgcagatcaaagagagtaaattaaggagtaaaagagtctctacatttatgaaccagctatgtcaggacctttcttaatatcaccttacaaaagtcaagattttcatgctttatttttgcaaaacacaccttatcttacagttcaagaactggtgacactccctcccacctgcccccataagcagcagcacatttcaaaaggattattaagacatcattaaattccacacttcgaacgaaaaaccagcacttttaaaaattcaacatgttcacaatggaatggacttcagtttctacagatgtggcttgagcgtgatccacttatttttacttggtactgattcactgatttattcccaatgctaaattcagcagagagatggtcattctacacaaatcctggaccctgaacactagccttcctcatcaaaaggaaaaca

SEQ ID NO: 13496 - DNA, 419 bp, Bos taurus
  Clone ID: 58-BOVMS1-020-Q1-E1-G10
gccttaatttttcactactatttttctccgactccctatccactccactactaattttaaccatatggctcctccctctaatactaatagctagccaacatcatctatcaaaagaaaacctaacccgaaaaaaactatttattactatgctgatctcactacaactattcctaattataacctttaccgccatggaactaatcttattttatattctatttgaagcaacactagtcccaacactcattattattacccgatgaggaaaccaaacagaacgcctaaacgccggactctatttcctattctatacactagctggctccctacccctattagtcgcactaatttatatccaaaacacagtaggattcctaaatttcctaatattacagtactgagtacaacctgttcataac

SEQ ID NO: 13497 - DNA, 442 bp, Bos taurus
  Clone ID: 58-BOVMS1-021-Q1-E1-G6
aatatactaacaatataccaatgatgacgagatgttatccgagaaagcaccttccaagggcaccataccccagctgtccaaaaaggcctccgttatggaataattctttttattatctccgaagtactattctttaccggatttttctgagctttctaccactcaagcctcgcccccacccctgaactaggcggctgctgacccccaacaggcattcacccactaaaccccctagaagtcccactgctcaacacctctgtcctattggcttccggagtttctattacctgagcccatcatagtttaatagaaggggaccgaaagcatatattacaagccctatttatcaccatcacattaggagtctacttcacactactacaagcctcagaatactatgaagcaccttttactatctccgacggagtttacggctcaactt

SEQ ID NO: 13498 - DNA, 386 bp, Bos taurus
  Clone ID: 58-BOVMS1-022-Q1-E1-G10
atgcgacgtcatagctcttctatagtgtcacctaaattcaattcactggccgtcgttttacaacgtcgtgactgggaaaaccctggcgttacccaacttaatcgccttgcagcacatccccctttcgccagctggcgtaatagcgaagaggcccgcaccgatcgcccttcccaacagttgcgcagcctgaatggcgaatgggacgcgccctgtagcggcgcattaagcgcggcgggtgtggtggttacgcgcagcgtgaccgctacacttgccagcgccctagcgcccgctcctttcgctttcttcccttcctttctcgccacgttcgccggctttccccgtcaagctctaaatcgggggctccctttaaggttccgatttagtgc

SEQ ID NO: 13499 - DNA, 434 bp, Bos taurus
  Clone ID: 58-BOVMS1-022-Q1-E1-G6
ctttgaatccatgtggtgggagtggtgactcccatatgccatctcatgcatagcctagacttcctacttatattctattgtgatctccaaaagctgtactgactttacatatactgtccccttttgtcatcccaacttatctctgggaacgagggactaatggccacagcaagcccactgaaagtcttgtgtaaagcaaagcagtgatcatttttaagtgacatgcaagaggcccccagttgtgcttgtgctgaagcctagtctgtgtcttcacaaaagtgctttagaaagtgtgtatgtgtgtataaatgtatgatatatatttatatatgttgctatagtgatatgtggaaagctaacataactggtggacagggtcagtgaaaggaaatgacacagtctttttggtggctattaaagcagactatgtataa

SEQ ID NO: 13500 - DNA, 295 bp, Bos taurus
  Clone ID: 58-BOVMS1-023-Q1-E1-G10
atgcaacgtcaaagcccttcaaaagggtcaccaaaattcaattcactggccgtcgttttaaaacgtcgtgactgggaaaaccctggcgttacccaacttaacccccttgcagaaaatccccctttcgcaagctggcgtaataccaaaaaggcccgcaccgatcgcccttccaaaaatttgcccaccctgaatggcaaatggaaccccccctgtaccggcccattaaccccggcgggtgtggtggttacccccagcgtgaccgctacacttgccagcgccctaacgcccgctcctt

SEQ ID NO: 13501 - DNA, 403 bp, Bos taurus
  unsure (370): unsure at all n locations; Clone ID: 58-BOVMS1-023-Q1-E1-G6
atgcgacgtcatagctcttctatagtgtcacctaaattcaattcactggccgtcgttttacaacgtcgtgactgggaaaaccctggcgttacccaacttaatcgccttgcagcacatccccctttcgccagctggcgtaatagcgaagaggcccgcaccgatcgcccttcccaacagttgcgcagcctgaatggcgaatgggacgcgccctgtagcggcgcattaagcgcggcgggtgtggtggttacgcgcagcgtgaccgctacacttgccagcgccctagcgcccgctcctttcgctttcttcccttcctttctcgccacgttcgccggctttccccgtcaagctctaaatcgggggctccctttanggttccgatttagtgctttacggcacctcgacc

SEQ ID NO: 13502 - DNA, 286 bp, Bos taurus; identical to SEQ ID NO: 9010
  Clone ID: 58-LIB188-002-Q1-E1-G10

SEQ ID NO: 13503 - DNA, 294 bp, Bos taurus
  Clone ID: 58-LIB188-002-Q1-E1-G6
acacccagctgcactacttacacgtcttccttcgtcttcacctaccctgaggctgactccttccccagctgtgcggctgcccaccgcaagggcagcagcagcaacgagccttcctctgactcgctcagctcacccacgctgctggccctgtgagcgggcagagaggggaagcagtgggcgtgcacgtggccactgcctgaattggcgcattacagagaggagaaacacgtcttccctcgagggttcccatagacctagggaagaccttatctgtgcgtgaaacacaccaagctg

SEQ ID NO: 13504 - DNA, 430 bp, Bos taurus
  Clone ID: 58-LIB188-003-Q1-E1-G6
gccggataccaaaaccatccctatggccccaccaacataagcccccagggctgggtctgtgcccacaaagggttggcctgttttgactgaactaacctgtggatttagtccaacaaatgcatttgcctgatttcagggctgaatttctgcttgacccaagtgtcaggcagagctgggtggcctcagctgactggcggtggacaggctgcaggatgggccgaaagtgcattactagagatgaccgcggttgaggacacctatttcccaggacccatggctatgtgaccacactggccgtgagtgactggttgttgaggatgactactctttagcaaacctattgtgtgtctgtagaggctgtttgatgattaaaacaatggctacttcctgttttggcaaatacttgactgcattttcatttgaatgaaca

SEQ ID NO: 13505 - DNA, 433 bp, Bos taurus
  unsure (377): unsure at all n locations; Clone ID: 58-LIB188-004-Q1-E1-G10
actttgaaatgataaccaatctgcctgaagatgtctcatgaaagaaaatcagctgaggactaagcttccacggagaaactttttatctagatcttgaaattatgggaacatttacttaaactgatgattagagctgaaaatgatattgtcgacttgagaaagcagaactttcagatatccaagtaaaagatttgcatataatcatactaaatgcaagtcacttaaacccttgacaaacttagagaaaaatcttccatctgtatatagtatatactttttacttttacacactttcctgtttagagcaatattaaatcaggaaaaactgcagggaggtgtttaacagctgagcttaattgaacattcagtcaacctcnaaagacacaacgtccttgccagcaatagttaaagcaacttcaagtttaaaaatgca

SEQ ID NO: 13506 - DNA, 383 bp, Bos taurus
  Clone ID: 58-LIB188-005-Q1-E1-G6
acaagcttattttttttttttttttttttttttttttttatagggaatgaaaatcaacagcatttctaattttatttcttgctaaaatgacagcagggaattgtaaatactgatgagcttggcaaaaatccgacttcaggaagggagaggaaggtccctcgcgcctggagattggggctgagagcagggaggagctgaggcccagggaggcaggctagcttctttgcaggctttacctcgtcaggaaggcgcaggcttccagaagcggggaggttgagcattttttcaggttggcaatggccgtgacatactctgtccccaaatattcttcatacgttggtctgcctccaagtttggccagacactcagtgttgtcattgaac

SEQ ID NO: 13507 - DNA, 174 bp, Bos taurus
  Clone ID: 58-LIB188-006-Q1-E1-G10
ggataccactttaacaagcacaccctgggacacagtgagagctaagcctcaggctggtttcccacagccacaggggtgacttccctggtcaccaaggcaatgcatgcatatttgggttaccttcatcttttctataagttgtaacaaaacatctacttaagttctttctttagt

SEQ ID NO: 13508 - DNA, 367 bp, Bos taurus
  Clone ID: 58-LIB188-006-Q1-E1-G6
ggccgggataccacgcaatggactgaggtcattgagaccgagccatgctgacatgtctttctagctctgtgtggatttaaagacacagatttgaatatgtcgagagtggttgtgtacgaaagacacactcctgccggaacttccgtgcaaaacatgatacactggctccatgttgttaaattgcacaactttcaaacctttgactgaggaagcagtggcagtaattattttcactacaaccaaagttcccctcccctttacaacgtgtaaagacatgctggtgccgactgccatctggagcggaggtcgggactggctcgcggacgacaaggacatcgtcctcttacagatgcacatctccaaactg

SEQ ID NO: 13509 - DNA, 387 bp, Bos taurus
  Clone ID: 58-LIB188-007-Q1-E1-G6
gccatgggcgcgggatacaactgcagctgcctagctcgagacctgaccaagatcttcgaggcctactggttcctgggccaggcgggcagctccatcccatcaacctggccccggccttacgacacccgctacaatcaagagactccaatggaaatctgcctcaacggaacccctgctctggcctacctggcgagtgcacccccaccgctgtgtccgagtggccgcaccccagacttgaaggccctgctcaacgtggtggacaacgcccggagtttcatctacatcgcagtcatgaactacctgcccatcatggagttctcccacccacgccggttctggcctgccattgacgacgggctgcggcgggctgcctatgagcggggcgtc

SEQ ID NO: 13510 - DNA, 387 bp, Bos taurus
  Clone ID: 58-LIB188-008-Q1-E1-G10
acaatgagtggtgctaagaagcaaattcagagcagcagagttactcagtcatctttaaaaacaaaacacacacacacagcccttgaagggaaggtagatagcatttacaaaaaaaaaaagtggtaactgacacaagagtcaactctaaagcccaatttccctttgtgtgctgtgcttagtcgctcagtcatgtccgactctttgtgacaccatggactgaagtccactaagctcctctgtccatggggattctccaggcaagaatactggagtgggtaacttttcccttcttcaggggattttcccaacccaggtctcccgcattgcaggtggattctttaccatctgagtcaccaggaagccatggttaacataaaaccccaaggt

SEQ ID NO: 13511 - DNA, 442 bp, Bos taurus
  Clone ID: 58-LIB188-009-Q1-E1-G6
cgccatgggcgcgggatacacgttctggctgagccagtctctctccgtgatggtcagcatgctgtaggccctgaaagttatgggtgaggactgcacagtctccacctggccttcagaaattccagacactatccgctttccatcacgaaaccaggacaaggagatctgtttggggctgaagtccgtggcctggcagatgaggctggacttgctattgccgtcaccagagaggctgttgcgaggcgggacaaagacactcacgactggggaaagcaattccgcctctgactcacttgtagcgatcaccctcacggtgccgacggtctttcctcccttggggtgctggacttcgcacaccaggtagtcatccggcccttgaaaggcgcttgaggagggcaggaccacctgagaggaggccgaccacaagccgtccctcaggact

SEQ ID NO: 13512 - DNA, 413 bp, Bos taurus
  Clone ID: 58-LIB188-010-Q1-E1-G10
accatggccttggcccctctgctcctcaccctggtcgctctctgcacaggatcctgggcccaggctgtgctgactcagccgtcctccgtgtccgggtccctgggccagagggtctccatcacctgctctggaagcagcagcaacatcggttggtctagtgtgggctggtatcaacaggtcccaggatcgggcctcagaaccatcatctatggtagtgtgaatcgaccctcgggggtccccgaccgattctccggctccaagtctggcaacacagccaccctcaccatcaactcgctccaggctgaggacgaggcagattatgtctgcgcaacggctgactacgatctcacgtctgctgtttttggcagagggaccgcgctgaccgtccagggtcagcccaagtccccaacctc

SEQ ID NO: 13513 - DNA, 429 bp, Bos taurus
  Clone ID: 58-LIB188-010-Q1-E1-G6
acggctttttcgagttggcttaggcagaattctcctctgggcgatgaagacgacgtgcttcccgctgaacttcttctccagctcgcgcaccaggcgcacctggattttctggaaagacttcagctgcgggacggggacgaagataataatagctttccggccaccgccaacttcgatctccttggcggccgtgatgttcagctcccgcagctgcgccttgaggtccgagttcatctccagctccagcagggcctgggagatccccgactcgaactcgtccggcttctcgccgttgggcttgacaatcttggcactggagctgaacatggccgggaccttgtagaggcggccaaacagtcttgccgctgccgacccgagacctgcccgggcggccgctcgaacattcaggtgtcgctccctctgtgatcg

SEQ ID NO: 13514 - DNA, 422 bp, Bos taurus
  Clone ID: 58-LIB188-011-Q1-E1-G6
gccatgggcgcgggatactgccctcaaggcccagcggccgacggggctccagcagctgctggagatggcccaggcccaggggaaccctcagagtgtcctccctactaccaggaggaggcaggctactaagacacccatgcgggccatctccccacatcattgccccatctgggtttttgggtctttctgtgatttttgtcttgtttttctacatgtctgaatgctgccagttgagactctgggggaaaggggtgaaggccatatccagatgcatgtggggtggggggtccccaccagggcagctccagacatcaggtttcccagcagactttaggccaagctgttagggggaagaagaaacccaggcaaggaagggaactgggcccaagtgggttccggttacatcctccctggcttccctt

SEQ ID NO: 13515 - DNA, 380 bp, Bos taurus
  Clone ID: 58-LIB188-012-Q1-E1-G10
acagccggccagtgccatcctgtatgactactacaaccctgagcacaagtgttctgtgttttatggggcaccacgtaagagcaaactcttgtccacgttgtgctctgcggatgtctgccagtgtgctgaggggaagtgccctcgacagcgccgggccctggagcgtgggcagcaggacttggagggttaccggatgaaattcgcctgctactctccccgagtggactacggcttccaggttaaggttctccgagaagacagcagggctgctttccgcctctttgagacccgtatcacccaagtcctgcatttcaccaaggatgccagggccaccgctgatcagaccagaaacttcctggtccgagcctcttgccgccttc

SEQ ID NO: 13516 - DNA, 442 bp, Bos taurus
  Clone ID: 58-LIB188-012-Q1-E1-G6
gccatgggcccgggatacttttgtagattgggaaaggaaataggagtttttctatgagtcagaaccaattcagaattaaactgcaagctggctttgaatgttacctctaagaggtgttcaaattccaatatattctaacatatcaacatataatgtattatatgcaattttgcaattattcaatcatgtgaaaatgaaagaatcaatgaattagaaatgttctacaacattcttcaccagcccaacctaaatcttctctttctatttatctttcacattaattttgggagattttcagagggtgtgattagtgagtaagaagtaaaaggaaatgagctctttcgtttctgctatcattccatctgcagggtcatcatccgccaatgcaggggtatgtcaggaagagcaaatggccctttttgatgccataatctcccatgat

SEQ ID NO: 13517 - DNA, 339 bp, Bos taurus
  Clone ID: 58-LIB188-014-Q1-E1-G10
acgtagatagacatctgcacgaggcgcatggcactcagtgcttagctcagtagtgcaagagggtcgagctcattgggcacatggcactacgagatcaagagtgcagcatctattccatggtggtcagccagctcctgctccaggtcgacgtggaatttacaagttccagtgctatttcgaggacttcattgtggcagagttaacacgaaccacgaaacctttccatgctgtgagaaacctgcgacagaaggttcttccttaagtgtgagtatcatcacttcagtgcaagagccgtgttggctgaggtgtaaggcatcctttctgattcctgatctatat

SEQ ID NO: 13518 - DNA, 331 bp, Bos taurus
  Clone ID: 58-LIB188-015-Q1-E1-G6
acatccgaggattcggggggttcggacccaactttatgctcttcgaaaagtgcgaagtgatcgcctaaaaggcgcatctgctcttctccttccttctggaggttctgcccactctcagtgaccacgccactgctctcattattgaccctaacttcatcgcctgctctccggtgtgccgcaaccacgtcgcctggaacttccacaatttcctgatgcgtccatacagtctgcccgtgcgcaagttccatcggccgaccgtgcacggtcaggttttggcaggggcgactccaagtgtaatgtctgccactatccatggtaccagtatcgccca

SEQ ID NO: 13519 - DNA, 413 bp, Bos taurus
  Clone ID: 58-LIB188-016-Q1-E1-G10
accttctcctgctactctgaatacagcatatctatcctactgcttacctaagacattgtaagtgaaacataaatcatcatgaaaggaagctctattaattggctttatcagttatataacatggaaaagaattaaactacatgcaacctcagccatgtccctaaaatgtcatttaacctataaaaattaaaaaaaaattggacctccctcacacaatctatattttacattaatctttttagaaagttatcatcatccactctagcaagctgacataaatggtgccgaggatgagctgttggttagaagtaaggctgaagattcaaagaattcctggttggttcttgagcactggatctttttcctggtttccggggaataacagggtctttgcatgattgaggaatacattc

SEQ ID NO: 13520 - DNA, 442 bp, Bos taurus
  Clone ID: 58-LIB188-016-Q1-E1-G6
gcggcgggatactcttgcctggaaaatcccagggacggaggagcctggtaggctgcagtccatggggtcgctaagagtcggacacgactgagcgacttcactttcacttttcactttcatgcattggaggaggaaatgacaacccactccagtgttcttgcctggagaatcccagggacgggggagcctggtgggctgccgtctatggggtcgcacagagtcggatgcgactgaagtgacttagcagcagcagcagcagcagaggttatctactagagacactagcccttaacattttaagaagaaattatacattgatcactcaggaattatatttcctttctatacaaattaacctttcgtatgaatagatcagctggagatgctttcagtgtgtttcctcaattgataactagtccctggcgctattgtttccctaaga

SEQ ID NO: 13521 - DNA, 371 bp, Bos taurus
  unsure (358): unsure at all n locations; Clone ID: 58-LIB188-017-Q1-E1-G6
gccggatacagctcgtaaacttcctcatctgtaaaccggtctcccattgtggtcagcagttctctcaggtaatcctcctgaatggtgccagttgcttcttcatcaaagcaagcaaaagcatttctgatgacatcttctggatctgtgccatttaacttttcaccaaacattgtgagaaacatggtaaaatttatgggacctggagcctcgttcatcatggcatccagatactcatcagttggattttttcccagggaagcaagcatgtcatgcaagtcttccttgtcaatgaacccatccctgttctggtcgatcatgttgaaggcctccttgaactcctgaatctgggactggtcanacatggcgaacac

SEQ ID NO: 13522 - DNA, 385 bp, Bos taurus
  Clone ID: 58-LIB188-018-Q1-E1-G10
gccatgggcgcgggatacgtcttgatccccactttcaccgttgttcttgctaccctccacccaggctgaaccactggtggaggggctcagctgggacttctcccaaccccctctcaggggtgtccgtccggaaatgaaggaatagcccgagaaccgggctggggtttatttaagcttttctgtgtgggtttagggagggcgggcactttaatgttattagggctggtttgggtgggggcaaagaatcttggccacaaagcgccagtttgcttaattttgtctcctggtctataccacctgcactgcaactgtgtggcagctgggggttcctccctggtcataaggggaactgggctcttgcaggcaacccatccccttcatgggt

SEQ ID NO: 13523 - DNA, 427 bp, Bos taurus
  unsure (409): unsure at all n locations; Clone ID: 58-LIB188-018-Q1-E1-G6
acttacgcaagaaactatagtgtatttatgggccagcatctgcctggggtcggactggaaagaagccgaccttccatgtgtattctaaatatttctcttcattgtctgggtgctagccacagcaaccctggctccaaacccagttacacaaggagttagcacccctgttttcaagcctgaaatccgcatcaccacaagaggagcttggagagcaggtaacactcatggcaaaatttcaggcatcacctacggggttacgtttcagaagcagctgcccatgctgcagctctggtaagacctctgttctcaaactctccactatagacaggatggagtgagggagggagacagagtctgcgggtctgaggagtgtttcattctggagcccctggcccgccaggagcctgcnacatggcccaatagcgtc

SEQ ID NO: 13524 - DNA, 407 bp, Bos taurus
  Clone ID: 58-LIB188-019-Q1-E1-G6
acaccagtgagaggagccattaccagaggtgccactgtgactcgaggagtgccacccccacctactgtgaggggtgctccagcaccaagagcacggacagcaggcatccagagaatacctttgcctccaccgcctgcaccagaaacatatgaagaatatggatatgatgatacatatgcagaacagagttatgaaggctacgaaggctattacagccagagccaaggggactcagaatattatgactatggacatggggaggttcaagattcttatgaagcatatggccaggatgactggaatgggaccaggccgtcgctgaaggcccctccagctaggccggtgaaaggagcatacagagagcacccatatggacgttattaaaaacaaacatgaggggaaaatat

SEQ ID NO: 13525 - DNA, 383 bp, Bos taurus
  Clone ID: 58-LIB188-020-Q1-E1-G6
gccatgggcgcgggatactcggtgaggatcggaggctccatcctggcctccctgtccaccttccagcagatgtggatcagcaagcaggagtatgacgagtctggcccctccattgtccaccgcaaatgcttctaaatggactgcgagcagatgcgtagcatttgctgcatgagttaattcagaagtataaatttgccgtggcaaatgtatacacctcatgctagcctcatgaaactggaataagcctttgaaaagaaatttgtcctcgaagcttgtatctgatatcagcactggattgtagaacttgttgctgattttgaccttgtattcaagttaactcttaccttggtatatgtttaataccctgtgcatatctttgattt

SEQ ID NO: 13526 - DNA, 286 bp, Bos taurus
  Clone ID: 58-LIB188-022-Q1-E1-G10
acctgtgtggtggggatgactgaagccccgcgacagcccaagcatcgaggacggctgctccgtgctccagctaacagttctccgcagtcagcccgcggctaacagcccctatgcccgtccccgggaggatgacattagcgctgcccgccccacccgctcttttgttagtttagtttcctacgcattacctggctttcccggctagtccctctttatagccaatgaaatgaacattccaaggatttggaagtggtatctatgatgtgaaacactttgcctctcgagt

SEQ ID NO: 13527 - DNA, 431 bp, Bos taurus
  Clone ID: 58-LIB188-022-Q1-E1-G6
acatgttccaggctggtctcgggctgctggttgtcgttggccttcatcagctcctggaatctagaaagcgcaagaggcccattcagaaggtagagatgggaacctcgagtcaaaacgacgtcgacatgagctggattcctcaggaaactctgaaccagatcaataaagcttcaccaagaaggttgcccaggaaacgggcacagaagagatcagtgggatctgatgagtaaatgttcctttgtgcaacaattcggtctttacttaacccgccctaatgtttttcggcctgatgggaattagtgcagagaagccatatcaccatagaaggcggctactacttatgtgtggactgagcaatccgagtctgtggcgatcatattgctgaaaatgcactgcatttatttttctaaagtaacaaatttggttttttt

SEQ ID NO: 13528 - DNA, 424 bp, Bos taurus
  Clone ID: 58-LIB188-023-Q1-E1-G10
acaaaaaccttacataaattaaaaggatgaataaatttacaggtgtgaatgcaaactgtttccaactcaaggcaagtaaccagaacagtgctctggtgggaaatcttcagtaagaaaggaaagcaggtcctacggcttggaccttcccaaccccgtgtaagaccggccaagacagaaatgacaactgtttcaaggactcttgccagcctctagagaaatcctggaataggcagctctgacacattaataccctgcacagactgagagactcagtctcccagattcttatcaagccattggatttctcttccataaacattctcacctcagctcgaggtgagagagccgcatataactaggggtttaaatcaaagatatgcacagggtattaaacatataccaaggtaagagttaacttgaatac

SEQ ID NO: 13529 - DNA, 446 bp, Bos taurus
  Clone ID: 58-LIB188-023-Q1-E1-G6
atggccgccggatacattattaaatgtgaccatgcattaaaatcctcctttcatgttataaggagagtaatccattttctttgtgatacattgtgttaattagttttgtgtggtctgtccctctaaagacctgtcgacgaatgttccattctccagggcttcttaagacgcccgggatgcttcctccgggtcgtctttggtcatttactaccagccaagtggccagaactgggggaagcccctccctgaaccatgatgctggtagatcccctctcacaaacctaatgctaccaacactgggaggacaggcaacgcaacttggtcaacagtgttactaacacattcatgtgggagtctctttggttatggaatttttacttttaattagttatgactataacaaatatagctagatatatgcccctgaaatcgatgacttatacaca

SEQ ID NO: 13530 - DNA, 448 bp, Bos taurus
  Clone ID: 58-LIB188-025-Q1-E1-G6
cgccatgggcccgggatacacggggatttcctttcaagggaggcagatggtttctcttgccaagttcggtgggtaggaggcattaagataagatagtccagggacaacaggggttgtgggggagtggcctcagctgtctgctgtcaccatcctgtctcttaaaaaaagttagatgccttcctgaacaggatctgaaaatcttgctgatgttgaaagggagtgaaaggcagatgaaatcctgactctctagctttcattcagttgtttccaccgcagggacacgtccgtgtgaatgttgaacctggttagggaagctgagcaccgttcctgttccacttgtcatcttgccggtcagctttccccaagtcttttctagagaatcctatttttctttaagaacctgcttgccaacaggcagtgacaatgaagcattggtggtgatgctcct

SEQ ID NO: 13531 - DNA, 417 bp, Bos taurus
  Clone ID: 58-LIB188-026-Q1-E1-G10
accaaataaagtatgaggagctgcagacactggctgggaagcacggggatgaccttcgtcgcacgaagacggagatttctgagatgaaccggaacatcaaccgtctccaggctgagatcgagggtctcaaaggccagagggcttccctggaggctgccatcgctgacgctgagcagcgtggtgagatggctgttaaggatgctcaggccaagctggccgagctggaggccgctctgaggaacgccaagcaggacatggcgcggcagctgcgcgagtacgtgctgttgaactgctcctctcttggcttcgacctggccgtgtgcacctccacgtcatccacgaaccaggagaactgcacctcggggttatcgtggcccacgttcaccaccacacacgtgacctcgggcgttcctgtga

SEQ ID NO: 13532 - DNA, 300 bp, Bos taurus
  Clone ID: 58-LIB188-026-Q1-E1-G6
cgggatacatttacagactgttgcacgttactttggacgttcaccggttacttaagtgggatcaagacaagtttttagcaccatctatgtttgaagatgcctcatttgggttggactacttccatattcagtttccctgctttttcagactgatagactttgatcctttgtgaaaataattaacagtctgtcatgatgttaccacaagtatctgcctttgattctctatgtacctggtttcccagtactgtgggcagtgtaggcaatactccactctggaagtgcaaatctgtcatctta

SEQ ID NO: 13533 - DNA, 294 bp, Bos taurus
  Clone ID: 58-LIB188-027-Q1-E1-G6
ccatgggcccgggatacatgtccaccgactcagtctgccggtctctctgccactccacgtctacatcttctgggtagaagccgatgaccatgcaggtgacgctgaccgtgcttttgctgagctcttccttgggtgggtccaggacatacacctgcggctcccgggccggccctttgctcctggagatgatcctcacgatggaggccgaaaggcctttgatgttgaccttgcacttgaactcctttcctccagtccagtcctggtgctggatgggcagggcgctgaccacgcggt

SEQ ID NO: 13534 - DNA, 430 bp, Bos taurus
  Clone ID: 58-LIB188-028-Q1-E1-G6
acatgaaaacaagccaggggtcttcccaccacaaagagttcctcttcaacatacatggggagaacctctttggagctgagttccagctgcaaatttgtgttccagttaaattacaaggtttccagttcctaacagtgacgaacctgaccaagattcaggcccacaccgtgtgcactcaggctctcgagcgcgtttgtgggagcgacctggttcagcttgtggaagaatggcattcagtaagctgtaaggtcacctcggataaagaaaatgtaaccgtggctgcagagctctccttgaatcagctaaagcagttactaagagatgtgactgagctgcagatccttggtgaaatatctttcaacaaatctctgtaagaaggggctcaacacagagaaccacagaactaagatcactgtcatcctcctgaaag

SEQ ID NO: 13535 - DNA, 427 bp, Bos taurus
  Clone ID: 58-LIB2809-002-Q1-E1-G6
catgctagctaccgccagtgcccgcgggatacctaaaagattctggaattaactgcttctacctggttatggttggactggaaaatctatcttctacagtttcatatctaccactttacttcatacaaccagcatgtttggagtggtgcatcaataagacaaatcgtagagtatttcctgaattatttatactctccctgttagtttatattgaatatactgggtttatatggtggtttcatacaaacttagctgatgattatttaaaatcctttccctactctttctgagttatagaaatatttttctttccctctgaaaataaaatttcaagtgcaaaagaaataggagagaggagagggtaaagagggcagagaggcaaggcaaaatagagaagaagctttgaaaaccttttttttttttttct

SEQ ID NO: 13536 - DNA, 471 bp, Bos taurus
  Clone ID: 58-LIB2809-006-Q1-E1-G10
ctcccggaggccatggcggccggatacctggtgagattgtggaaagcctttcaagcagtgaggaatctattacacgcatcaagtaagaaaattgagaagtttcagagtgaggaacagcagcaaacagaggatgaactccaggataaaatccacccctttgcccagacacagtctctagtctatcccttccctgggcccatccctaacagcctcccacaaaacatccctcctcttactcaaacccctgtggtggtgccgcctttccttcagcctgaagtaatgggagtctccaaagtgaaggaggctatggctcctaagcacaaagaaatgcccttccctaaatatccagttgagccctttactgaaagccagagcctgactctcactgatgttgaaaatctgcaccttcctctgcctctgctccagtcttggatgcaccagcctcaccagcctcttcctccaactgtcatg

SEQ ID NO: 13537 - DNA, 386 bp, Bos taurus
  Clone ID: 58-LIB2809-006-Q1-E1-G6
acagcaaaaaggcctgaatgggcatatctctctggggatagggcactgctttctggggaacaggcaggactttggactgagaaagggacagcacggactgaggaggaaacatgacagttggaggaagaggctggtgaggctggtgcatccaagactggagcagaggcagaggaaggtgcagattttcaacatcagtgagagtcaggctctggctttcagtaaagggctcaactggatatttagggaagggcatttctttgtgcttaggagccatagcctccttcactttggagactcccattacttcaggctgaaggaaaggcggcaccaccacaggggtttgagtaagaggagggatgttttgtgggaggctgttagggatgggc

SEQ ID NO: 13538 - DNA, 190 bp, Bos taurus
  Clone ID: 58-LIB2809-008-Q1-E1-G6
gggatacctagtaacagatcctggaacacaagagggacattaatggaaaattgatgaaatctgaaacagatccagggtatttttaacaacagtgttggtttcttagtcttgatcaatgtaccagagagatgtaaaatgttaatgtcaggggaaactgtaattgggtcgagagtgtatgggaattctctgt

SEQ ID NO: 13539 - DNA, 384 bp, Bos taurus
  Clone ID: 58-LIB2809-010-Q1-E1-G10
acaaagaagcaaaacgaggtagccacggggcagaggagttccaggaacagaaagaggacagaagcagcaaagacagcaggtgttcacaacttctcacagagccactgatccagcttctcagaacagagtgctttatgggccaaccagtagttaattcctactttatccagaatcttcttgacacacataatgtcatcagtaagatcatcatccaggaacttgtcacaggagatgttacagatgttgcttgagtgagggttctggtcgtctttgcaccaaattttattatttatctggaagagtccatattctgtgctgtcattgttttgtacaagcttttttttttttttttttttttttttttagtgccttaaaatgttattt

SEQ ID NO: 13540 - DNA, 387 bp, Bos taurus
  Clone ID: 58-LIB2809-011-Q1-E1-G6
gatacaacagaaatgcctagctgggcatatctctctggggatagggcacagctttctggggattagggtggactttggactgagaacgggacaacacggtttgaggacgatacatgacagttctaagcatacgatagtcatgctggtccatcagatactggagcagatgcagaggactgtgcagatttgtaacatcagtactagtcaggctctggctttcagtagagggcttacctggaaattcacggaacggcatttctttgtgcctatgaaccataatcactttcattttagatacgcccattacatcatgctaaccgaaaggctgcatcaccataggggtttgactacgccgacggattttttctcggacgctgttacggatgg

SEQ ID NO: 13541 - DNA, 423 bp, Bos taurus
  Clone ID: 58-LIB2809-012-Q1-E1-G10
acaccaagctggtgggacaggatgtggccaagtttatgaactggatggcggatgaatttaactatcccctgggcaatgtgcatctcttgggatacagccttggggcccatgttgctggtattgcaggaagtctgaccaataagaaggtcaacaggataaccggcttagatccagctggacctaacttcgagtatgcagaagctccaagtcgcctttctcctgatgatgcggattttgtagacgttttacacacattcaccagggggtcaccaggtcgaagtatcggaatccagaaaccagtagggcatgtggacatttaccctaacggaggcactttccaaccaggatgtaacattggggaagctctccgtgtgattgcagagagaggccttggagatgtggatcagctagtgaagtgctccc

SEQ ID NO: 13542 - DNA, 400 bp, Bos taurus
  Clone ID: 58-LIB2809-013-Q1-E1-G6
acaaaacaatgacagcacagaatatggactcttccagataaataataaaatttggtgcaaagacgaccagaaccctcactcaagcaacatctgtaacatctcctgtgacaagttcctggatgatgatcttactgatgacattatgtgtgtcaagaagattctggataaagtaggaattaactactggttggcccataaagcactctgttctgagaagctggatcagtggctctgtgagaagttgtgaacacctgctgtctttgctgcatctgtcctctttctgttcctggaactcctctgccccgtggctacctcgctttgcttctttgtacccccttgaagctaactcatctctgatccctgggccctgtagtgacaatggacatgtaaggactaatct

SEQ ID NO: 13543 - DNA, 439 bp, Bos taurus
  Clone ID: 58-LIB2809-014-Q1-E1-G10
acttttggacgtattttccatgggattttagtagatgaaaaagatccaaataaagaaaaacaagcatttgtgaaaacagttaaagatcaagcttctgaaattcaggtgacaatgatgctcaccgaaagttgtaagctccgaggtcttcatcacagaaatcttcttcctattaccaatgtgtgtatagaagaaggagaaaagcccatggtgatattgccttacatgaattgggggaatcttaaattgtttttacggcagtgcaaattagtagaggccaataatccgcaggcaatttctcaacaagacctggtccacatggctattcagattgcctgtggaatgagctatctggccagaagggaagtcatccacaaagacctggctgctaggaactgcgtcattgatgacacacttcaagttaagattacagacaatgccc

SEQ ID NO: 13544 - DNA, 445 bp, Bos taurus
  Clone ID: 58-LIB2809-014-Q1-E1-G6
gatacatggtgaaattgtggaaagcctttcaagcagtgaggaatctattacacgcatcaataagaaaattgagaagtttcagagtgaggaacagcagcaaacagaggatgaactccaggataaaatccacccctttgcccagacacagtctctagtctatcccttccctgggcccatccataacagcctcccacaaaacatccctcctcttactcaaacccctgtggtggtgccgcctttccttcagcctgaagtaatgggagtctccaaagtgaaggaggctatggctcctaagcacaaagaaatgcccttccctaaatatccagttgagccctttactgaaagccagagcctgactctcactgatgttgaaaatctgcaccttcctctgcctctgctccagtcttggatgcaccagcctcaccagcctcttcctccaactgtc

SEQ ID NO: 13545 - DNA, 408 bp, Bos taurus
  Clone ID: 58-LIB2809-015-Q1-E1-G6
cgcgaccggcccgggataccacagcaggaaattgttcccaatagtgctgaggaacgacttcacagtatgaaagagggaatccatgcccaacagaaagaacctatgataggagtgaatcaggaactggcctacttctaccctgagcttttcagacaattctaccagctggatgcctatccatctggtgcctggtattacgttccactaggcacactatacactgatgccccatcattctctgacatccctaatcccattggctctgataacagtgaaaagactactatgccactgtggtgaagagtcaagtgaattctgagggactccacagttatggtctttgatggttctgaaaattccatgctctaaatctcttttcatcgatcatgttcagacattctatccaaa

SEQ ID NO: 13546 - DNA, 391 bp, Bos taurus
  Clone ID: 58-LIB2809-017-Q1-E1-G6
gccatgggcgcgggatacagcagaaaggcctgaatgggcatatctctctggggatagggcactgctttctggggaacaggcaggactttggactgagaaagggacagcacggactgaggaggaaacatgacagttggaggaagaggctggtgaggctggtgcacccaagactggagcagaggcagaggaaggtgcagattttcaacatcagtgagagtcaggctctggctttcagtaaagggctcaactggatattttgggaagggcatttctttgtgcttaggagccatagcctccttcactttggagactcccattacttcaggctgaaggaaaggcggcaccaccacaggggtttgagtaagaagagggatgttttgtgggaagctgt

SEQ ID NO: 13547 - DNA, 403 bp, Bos taurus
  Clone ID: 58-LIB2809-021-Q1-E1-G6
cgccatggccgcgagatacagcaaaaaggcctgaatgggcatatctctctggggatagggcactgctttctggggaacaggcaggactttggactgagaaagggacagcacggactgaggaggaaacatgacagttggaggaagaggctggtgaggctggtgcatccaagactggagcagaggcagaggaaggtgcagattttcaacatcagtgagagtcaggctctggctttcagtaaagggctcaactggatatttagggaagggcatttctttgtgcttaggagccatagcctccttcactttggagactcccattacttcaggctgaaggaaaggcggcaccaccacaggggtttgagtaagaggagggatgttttgtgggacgctgttagggatgggc

SEQ ID NO: 13548 - DNA, 414 bp, Bos taurus
  Clone ID: 58-LIB2809-022-Q1-E1-G6
ccatgggtccgggatacttatcatgggcatgcacttgccccgagaaatgcctgtttgtgagtcctggaagaatgattattttttaaaacgttttgttgcttctcttgtgcgtctgaattcccttttgtacaagcttttttttttttttttttttttttttttttccattgcatttgattggctttattatgcaggaatcaaaaaattaaatctggcataaaagtaaaatgtaagaggagacgaggaaggagccagatctgtgaaaatcatattctctgttcaccgaaggcagacaactggccaaaggaaagtttgaagtagtcatttggtttcagctagacctgcgttgtcttctttgatgtctccttagagtttttagactgcagttgaagtaacttggactgtgttgatctc

SEQ ID NO: 13549 - DNA, 377 bp, Bos taurus
  Clone ID: 58-LIB2809-023-Q1-E1-G6
gataccaggtaagattgtggaaagcctttcaagcagtgaggaatctattacacgcatcaataagaaaattgagaagtttcagagtgaggaacagcagcaaacagaggatgaactccaggataaaatccacccctttgcccagacacagtctctagtctatcccttccctgggcccatccataacagcctcccacaaaacatccctcctcttactcaaacccctgtggtggtgccgcctttccttcagcctgaagtaatgggagtctccaaagtgaaggaggctatggctcctaagcacaaagaaatgcccttccctaaatatccagttgagccctttactgaaagccagagcctgactctcactgattgttttgggg

SEQ ID NO: 13550 - DNA, 438 bp, Bos taurus
  Clone ID: 58-LIB2809-028-Q1-E1-G10
ccatgggcccgggatacagcagaaaggcctgaatgggcatatctctctggggatagggcactgctttctggggaacaggcaggactttggactgagaaagggacagcacggactgaggaggaaacatgacagttggaggaagaggctggtgaggctggtgcatccaagactggagcagaggcagaggaaggtgcagattttcaacatcagtgagagtcaggctctggctttcagtaaagggctcaactggatatttagggaagggcatttctttgtgcttaggagccatagcctccttcactttggagactcccattacttcaggctgaaggaaaggcggcaccaccacaggggtttgagtaagaggagggatgttttgtgggaggctgttagggatgggcccagggaacggatagactagagactgtgtctgggcaa

SEQ ID NO: 13551 - DNA, 423 bp, Bos taurus
  Clone ID: 58-LIB2809-029-Q1-E1-G10
tgggcccggcataggatacatgtaagctcaccactagcaatggtattgatggtagggatttctgttttaacctgatttttctttggtggaatggccataaatgataaatgtgggtgtgggtgacgtgccatggtagttggctgggcttggcaggacttggcaagcacagtatttgacaaaacttgccattgaagaatttgggcaggtgacctaactgcagctggctttgcataatatgggtatggcagacattgattattaattagtgcaactggtttctgttggtagtaattgagtccatacctaggatacctactcaacacatactgaattgggatatatttggctattttgtcactgaagaatcattcatcattctcacagcgctgttaacaaataaattatgcagaatggtattatttc

SEQ ID NO: 13552 - DNA, 389 bp, Bos taurus
  Clone ID: 58-LIB2809-030-Q1-E1-G6
aacagcaaaaaggcctgaatgggcatatctctctggggatagggcactgctttctggggaacaggcaggactttggactgagaaagggacagcacggtctgacgatgaaacatgacagttggacgaagaggctggtgaggctggtgcatccaacactggagcagaggcagaggaaggtgcacattttcaacatcagtgagagtcatgctctggctttcagtaacgggctcaactggatatttacggaagggcatttctttgtgcttaggagccatatcctccttcactttggagactcccattacttcatgctgaaggaaacgcggcaccaccacaggggtttgcgtcacacgatggatgttttgtgggacgctcttacggatgggccc

SEQ ID NO: 13553 - DNA, 413 bp, Bos taurus
  Clone ID: 58-LIB2809-031-Q1-E1-G10
acagcaaaaaggcctgaatgggcatatctctctggggatagggcactgctttctggggaacaggcaggactttggactgagaaagggacagcacggactgaggaggaaacatgacagttggaggaagaggctggtgaggctggtgcatccaagactggagcagaggcagaggaaggtgcagattttcaacatcagtgagagtcaggctctggctttcagtaaagggctcaactggatatttagggaagggcatttctttgtgcttaggagccatagcctccttcactttggagactcccattacttcaggctgaaggaaaggcggcaccaccacaggggtttgagtaagaagagggatgttttgtgggaggctgttatggatgggcccagggaagggatagactagagactgt

SEQ ID NO: 13554 - DNA, 399 bp, Bos taurus
  Clone ID: 58-LIB2809-031-Q1-E1-G6
actaggcctatcaagaaagctgtgaatggcaacatcacagacacaaaagggccatttctgggttgtccttacccaagaaaaagatggaggcaagtttaacacaagatttttttaaagatacactaaatgaaaatctctaagagaaaatgtcttccttgggacatgaaagggtaatatatgggacataacagaaccgtatgtatgttgtctgtgacctctgtggacatgtgcctgaattcccacctgggagtgattggaacagtggggccaaggtcattgggggatgtttggtttttgtggtatatgtggcaggatctctggggtgagacagtgcactaagtcgtgtctgactcttgcgaccccatggactgtagcctgccaggctcctctgtctatggg

SEQ ID NO: 13555 - DNA, 389 bp, Bos taurus
  Clone ID: 58-LIB3057-001-Q1-K1-G10
gcgagcggccgccctttttttttttttttttatagtgaaaacttttatatttggaattagccagctggactcagtttagatgatgccaattttgttggcaacatccaaagcatcatagtcaggagccagtcgaacatatgccttcttctctccatcaggcctgatcagagtattgaccttagccacgtcaatgtcatagagcttcttcacagcctgtttaatttggtgcttgttggccttgacgtccacaatgaataccagtgtgttgttgtcttctattttcttcatggctgactcggtggtgaaaaaacgatcagagtagtggtatttcaccggcggcccgcaaggccggcggacctccgcccgtccccttgcgggaaacggggggg

SEQ ID NO: 13556 - DNA, 347 bp, Bos taurus
  Clone ID: 58-LIB3057-001-Q1-K1-G6
atggtttagcaccaggcgccccactaacgtgcggtgcgtgacgggcgagggggcggccgcctttccggccgcgccccgtgtcccgggacgaagggctctccgcaccggaccccggtcccgactcgcggcgggggcgcgccgcgccgcgccccgggggacgcgggcgacggcccgccggcggggacggcgggggaccggctatccgaggccaaccgaggctcccgcggcgctgccgtatcgttccgcctgggcgggattctgacttagaggcgttcagtcataatcccacagatggtagcttcgccccattggctcctcagccaagcacatacaccaaatgtctgaac

SEQ ID NO: 13557 - DNA, 439 bp, Bos taurus
  Clone ID: 58-LIB3057-002-Q1-K1-G6
gcccaacagacccaccatgaagtccttatgagcttgattcttgggttgctgcgctcctggaatgaccctctctatcacctagtcaccgaggtgcggggtatgaaaggagccccagatgctatcctatcgagggccatagagattgaggaagaaaacaaacgacttctggaaggcatggagatgatatttggccaggttattcctggagccaaagagactgagccctaccctgtgtggtcaggactcccgtccctgcaaactaaggatgaagatgcacgttattccgctttttataacctgctccactgcctgcgcagggattcaagcaagattgacacttaccttaagctcctgaattgcagaatcatctacaacaacaactgctaagcccacattcatcctatccatttctgagatggttcctaatgatccattccct

SEQ ID NO: 13558 - DNA, 131 bp, Bos taurus
  Clone ID: 58-LIB3057-003-Q1-K1-G10
cggacgcgtgggcggacgcgtgggcagacgcgtgggattcgcccaggcagggatggcgccaggtatcccgactcttaaagctgtctgtagttaagaaataaaacctttcaagtttcaaaaaaaaaacaaaa

SEQ ID NO: 13559 - DNA, 360 bp, Bos taurus
  Clone ID: 58-LIB3057-003-Q1-K1-G6
aagttctggctggcagttgcgtggaaatgggcactggtgggcagaatggtcttcggcctgtcaaagggaacaccgaaggggttacagagggaaaggggaagacggatgaggtgacaatgacttcgaatactgatgcctcggcttcctgccagtacaggtgcatcgaatgcaaccaagaggccaaggaattgtaccgagactataaccacggcgtgttgaagataacaatctgtaaatcctgccagaaacctgtagacaaatacatcgagtatgatcctgtaatcatcttgattaatgctattttatgcaaagcccaggcctacaggcatattcttttcaataccaaaaataaacatgcac

SEQ ID NO: 13560 - DNA, 350 bp, Bos taurus
  Clone ID: 58-LIB3057-005-Q1-K1-G10
ctgcttcgcactgagtgcgtcccatttagggcgctgaagatggtttaaaaaatatgcagttgatatgaacagagcgcgatgagattagaattgtccggaggttctgccctgggcagtgtgggctgggccaaatggaatgatcttttaattctgagcaggttaccaaatgaaatgtcatggctttactttggtcaattaaaggggggaattttttttaaatgtgccttatttgttttgacttataactgatttgaggaagcctaaagtttatgccaggctggtagaaggacagagagcagacctcatctgtggtcttagctctctaaatgagccatgtatgggggcattct

SEQ ID NO: 13561 - DNA, 372 bp, Bos taurus
  unsure (311): unsure at all n locations; Clone ID: 58-LIB3057-005-Q1-K1-G6
gcttcctggtgaagtgtgtttcttgaaatcatcaccaccatggacagcaaaggttcgtcgcagaaagggtcccgcctgctcctgctgctggtggtgtcaaatctactcttgtgccagggtgtggtctccacccccgtctgtcccaatgggcctggcaactgccaggtatcccttcgagacctgtttgaccgggcagtcatggtgtcccactacatccatgacctctcctcggaaatgttcaacgaatttgataaacggtatgcccagggcaaaggggtcattaccatggccctcaacagctgccatacctnctcctttctacccctgaagataagaacaagcccaacagacccaccatgaagtccctatgag

SEQ ID NO: 13562 - DNA, 429 bp, Bos taurus
  Clone ID: 58-LIB3057-008-Q1-K1-G10
gccttcctgttaactcttaataaacttacacatgcaagcatctacaccccagtgagaatgccctctaggttattaaaactaagaggagctggcatcaagcacacaccctgtagctcacgacgccttgcttaaccacacccccacgggaaacagcagtgacaaaaattaagccataaacgaaagtttgactaagttatattaattagggttggtaaatctcgtgccagccaccgcggtcatacgattaacccaagctaacaggagtacggcgtaaaacgtgttaaagcaccataccaaatagggttaaattctaactaagctgtaaaaagccatgattaaaataaaaataaatgacgaaagtgaccctacaatagccgacgcactatagctaagacccaaactgggattagataccccactatgcttagc

SEQ ID NO: 13563 - DNA, 254 bp, Bos taurus
  Clone ID: 58-LIB3057-009-Q1-K1-G6
tgctccactgcctgcgcaggagcaggttatgaaaggcattttcccgagcatcttgaggcgtagattgaacgaacggaactactgatcacacaaggtacgtcttatccattttggatacaggacttaccgagccatatattgtctaactgctttgaacaagatagctgtgtaatgcatgcttggctataatggttgatatgatagcttatgacagactctgtatccatgtcaaaatctagactaagtgataaaaa

SEQ ID NO: 13564 - DNA, 333 bp, Bos taurus
  Clone ID: 58-LIB3057-010-Q1-K1-G6
actttttacataattaatgccttaactcattaattaaaattataataattttcactcattgactaccacatagtcattattaacaaacacctttccttccctcagttatttgctaaaccctctttaccttacacttcttaaatattccaaaataaaaagcttatgcagcctaagattaagataataaaaaaaggccacaaatgttcccttctctctttaagtaactacaattataacatcaaacataaataaattatattaaataaatgaagcaaattaaataaatatcttgttgtgcatcattaaaaaaatctaaattaaaatttaaatgtt

SEQ ID NO: 13565 - DNA, 429 bp, Bos taurus
  Clone ID: 58-LIB3057-012-Q1-K1-G6
gcttcctggtgaagtgtgtttcttgaaatcatcaccaccatggacagcaaaggttcggcgcagaaagggtcccgcctgctcctgctgctggtggtgtcaaatctactcttgtgccagggtgtggtctccaccctcgtctgtcccaatgggcctggcaactgccaggtatcccttctagacctgtttgaccggtcagtcatggtgtcccactacatccatgacctctcctcggaaatgctcaacgaatttgataaacggtatgcccagggcaaagggttcattaccatggccctcaacagctgccatacctccttccttactacccctgtagataaagaacatgcccatcatacccaccatgaagtccttatgagcttgattcttgggttgctgcgctcctggaatgaccctctctatcacctattcacc

SEQ ID NO: 13566 - DNA, 408 bp, Bos taurus
  Clone ID: 58-LIB3057-013-Q1-K1-G10
ggcgccccacgaacgtgcggtgcgtgacgggcgagggggcggccgcctttgcggccgcgccccgtgtcccgggacgaagggctctccgcaccggaccccggtcccgacgcgcggcgggggcgcgccgcgccgcgccccgggggacgcgggcgacggcccgccggcggggacggcgggggaccggctatccgaggccaaccgaggctcccgcggcgctgccgtatcgttccgcctgggcgggattctgacttagaggcgttcagtcataatcccacagatggtaacttcgccccattggctcctcagccaagcacatacaccaaatgtctgaacctgcggttcctctcgtactgagcaggattaccatggcaacaacacatcatcagtagggtaaaactaacctgtctt

SEQ ID NO: 13567 - DNA, 419 bp, Bos taurus
  unsure (314): unsure at all n locations; Clone ID: 58-LIB3057-015-Q1-K1-G6
gagcttcctggtgaagtgtgtttcttgaaatcatcaccaccatggacagcaagaggttggtcgcagaaagggtcccgcctgctcctgctgctggtggtgtcaaatctactcttgtgccagggtgtggtctccacccccgtctgtcccaatgggcctggcaactgccaggtatcccttcgagacctgtttgaccgggcagtcatggtgtcccactacatccatgacctctcctcggaaatgttcaacgaatttgataaacggtatgcccagggcaaagggttcattaccatggccctcaacagctgccatacctnctcccttcctacccctgaagataaagaacaagcccaacagacccaccatgaagtccttatgagcctgattcctgggttgctgcgcttctggaatgaccctttgta

SEQ ID NO: 13568 - DNA, 418 bp, Bos taurus
  Clone ID: 58-LIB3057-016-Q1-K1-G10
tgtgaccaaaatgctaatctagagcaacatttaacctactggcttggtgaacgctgcgatgtaatcaatttcactcttataattggagtaactattttggcagaatggaggagggttcacttgtagcttaggggtatctttggtttttttgtttgttccagtttttcttttaaggagttcctgaatccagtggcccaccctggaggctttggttgctgggatggccttaggtgttgctgttttcagatagtgtagggtggatcctaagctgtgcgagtgtaacccttttgacgtggtgggggggaatgttaatgtcaagctggttatttctgttttttttgggtggttgttgttgtttgtttttttttcttttttgtttttattttgttttttttttttttttttttttttttttttt

SEQ ID NO: 13569 - DNA, 434 bp, Bos taurus
  Clone ID: 58-LIB3057-016-Q1-K1-G6
ctggagtgggttgccatttctttctcaattactggaacgggttaccatttccgagtcgaggggatcttcccaacccaggagttgaaccggagtctcctgtgtcttctgcagtggcaggcggattctttaccacggcaccacctgggaagcccatctgctattgtgggttatcatatgagaagtcagtggagagaagtatatctggaagtgcagtggctatgtcagactcagaagccaccaccattctcaaagcagtgtttgtggaggaattgtaaccgagcaggaccctgtgggtacctctgtcaagtttataattaacccctctatctgaacctttatttcttttgttatttaaaacttgttcttctcaagattgaggagaatctaagaaaaggaggtggaattgtaaccaagcatagcaggaccctatggga

SEQ ID NO: 13570 - DNA, 365 bp, Bos taurus
  Clone ID: 58-LIB3057-018-Q1-K1-G6
tccgccacccttgtggcagaagtgaagaggaactaaaaagcctttgatgaaagtgagagagagagtgaaaaagttggcttaaagctcaacatttagaaaacgaagatcatggcatctggtcccatcacttcatgggaaatagatggggaagcagtggaaacagtgtcagactttatttttttgggctccaaaatcactgcagatggtgactgcagccatgaaattaaaagatgcttactccttggaagaaaagttaggaccaacctagatagcatattgaaaagcagagacattagtctgccaacaaaggtccgtctagtcaaggctatggtttttccagtggtcatgtatggatgtgagaagtt

SEQ ID NO: 13571 - DNA, 331 bp, Bos taurus
  Clone ID: 58-LIB3057-019-Q1-K1-G6
gtctgaggttgcgtctgtcgttgtttgtagctggagccgcagtggccgtgaagatggcgtctaccagccgtttggatgctcttccaagagtcacatgtccaaaccatccagatgcgatcctagtggaggactacagagctggtgatatgatctgtcctgaatgtggcctggttgtaggtgaccgagttatcgatgtaggatctgagtggagaactttcagcaatgataaagcaacagaagatccatctcgagttggagattctcagaatcctcttctgagtgatggagatttgtctactatgattggcaagggtacaggagctgcaagttt

SEQ ID NO: 13572 - DNA, 417 bp, Bos taurus
  Clone ID: 58-LIB3057-020-Q1-K1-G10
cggacgcgtgggcgcgggcagagctggacgccaatgacaagatccccctcccctgagctgatgccctttctacagccaggagccaatggctagggacaaagccaaaccctgtgagctggaccaggagaaatacgatgctgatgacaatgtgaaaatcatctgcctgggagacagcgctgtgggcaagtccaacagacatgaagatgacccaaaaaagtttcaattttgccaggaagttctccttgcccctgtactttgtctcagctgctgatggtaccaacgttgtgaagctcttcagtgatgcgatccgactagctgtgtcttacaaacagaactcccgggacttcatggatgaggtgttgcaggagctcgagaacatcgacttgaagcgggaggaggaggaggaggaggagatgc

SEQ ID NO: 13573 - DNA, 420 bp, Bos taurus
  Clone ID: 58-LIB3057-022-Q1-K1-G6
acatgcaatatttttattttagacatgcaaggaaagctatttgagcatgtactagtttaaagcaagcggctgtatacaaataacaaaagaagcaacatcttgttacagctgggcatacagcatccaaagcaaacaggcatgagacaatgcatatttatgcagcattaaaaccagatgaataccatgttgcaaggctgggggagggaaagaggaaaaaagtggaaatgaaagaccaatgtttcccaatgctatcaatgtataatgctaatttctcatttgatagcccatccaggtgcttcaaatgtcatgtaatacagcaagaatggaagaatggaaataactgatctgcacccctgcctaatacacattttcacaggtcttctttcagtggtaaaccactgagcatcttttgaaacttgt

SEQ ID NO: 13574 - DNA, 405 bp, Bos taurus
  unsure (308): unsure at all n locations; Clone ID: 58-LIB3057-023-Q1-K1-G10
acctggtgaagtgtggatcttgaaatcatcaccaccatggacagcaaaggttcgtcgcggaaagggtcccgcctgctcctgctgctggtggtgtcaaatctactcttgtgccagggtgtggtctccacccccgtctgtcccaatgggcctggcaactgccaggtatcccttcgagacctgtttgaccgggcagtcatggtgtcccactacatccatgacctctcctcggaaatgttcaacgaatttgataaacggtatgcccagggcaaagggttcattaccatggccctcaacagctgccatacctnctcccttcctacccctgaagataaagaacaagcccaacagacccaccatgaagtcccttatgagcttgattcttggggtgctgcgctcctggaatga

SEQ ID NO: 13575 - DNA, 407 bp, Bos taurus
  Clone ID: 58-LIB3057-025-Q1-K1-G10
ctagatcggagcggccgtccttttttatttctttttgattttttttgacatcgggcagagtctgtttttatttaagatgaaacccattagagccaagcatgcattacaaagctataaagctcagagaagtttgccagggaatggatcattaagaaccatctcagaaatggataggatgaatgtgggcttagcagttgttgttgtagatgattctgcaattcaggagcttaaggtaagtgtcaatcttgcttgaatccctgcgcaggcagtggagcaggttataaaaagcggaataacgtgcatcttcatccttagtttgcacggacgggagtactgaccacacagggtagggctaagtctctatggctccaggattgacctggccaaatatcatactgatgccttcc

SEQ ID NO: 13576 - DNA, 435 bp, Bos taurus
  Clone ID: 58-LIB3057-025-Q1-K1-G6
cagtgtttaggttttcctagcggccgcccaagatgaaccgattcttcgggaaagcgagacccaaggctccgccgcccagcttgactgactgcattggcacggtggacagcagagcagaatccattgacaagaagatttctcggctggatgctgaactagtgaagtataaggatcagatcaagaagatgagggagggacctgcaaagaatatggtcaagcagaaagccttgcgggttttaaagcaaaagcggatgtacgagcaacagcgggacaatctcgcccaacagtcatttaatatggagcaagccaactacaccatccagtccttgaaggacaccaagaccacggttgatgctatgaaattgggagtaaaggaaatgaagaaagcatacaagcaagtgaaaattgaccagattgaggatctacaagaccagc

SEQ ID NO: 13577 - DNA, 422 bp, Bos taurus
  unsure (410): unsure at all n locations; Clone ID: 58-LIB3058-001-Q1-K1-G10
tcagcgcagcagcctacaactagttcctaaatgccactttggactaatttaaaaaagaatcccagtttttacttttactcgatggtgaaattggttgctcttgtattttatggggaaaaaacaaaaagatttttttaaccttcatacatagaagcaaaaatactttaactgctgtaaaccttcaaaagttaatagaaatgagatatactggtttgtttcttattttgattggagaaaaattaaattgctgcatttcgcagtgacccatttacatggcattctcagcttagactgcataagaagaaatatatgtggtgaaatgttggaaccatttctctcggtctctgtttaatgttgaaagggtgagctaataggcaatttcaacttcactccctcacattacccgtccnctccaggctgtc

SEQ ID NO: 13578 - DNA, 393 bp, Bos taurus
  Clone ID: 58-LIB3058-001-Q1-K1-G6
cggactcgtgggcttagctcgtcggggtcagtaaccgggacccgtgtctactcctgttgcctgcgcctgctgacccgtagccaccatgcgtgagtgcatctccatccacgttggccaggctggtgtccagatcggcaatgcctgctgggagctctactgcctggaacacggcattcagcccgatggccagatgccaagtgacaagactattgggggaggagacgactccttcaacaccttcttcagtgagacaggggctggcaagcatgtgcccagggcagtgtttgtagacctggaacccacagtcattgatgaggttcgcactggcacctaccgtcagctctttcaccctgagcagctcatcacaggcaaagaaaatgctgccaataacta

SEQ ID NO: 13579 - DNA, 432 bp, Bos taurus
  Clone ID: 58-LIB3058-002-Q1-K1-G6
gggcggtgtgcagggagggatatcgaatggtgagattgtgcacttcaaagttgcttttaagccgacaccatctatcggggtgaaacagaacactgtgtcaagggagcgtcagaacgttgagcttctggcaagagggcgccatgacccatgcgtcgcccctcgagctgttcctgtggtggaatccatggccgcgttggtcctcgtggaccagctgatggcgcacgtggcccagtgcgagatgttcgcgctcaatgctgcacttcaagaaccagttggctctttctagcagaggcagagcacacctgatgagctcgcgccaaattttatcatttatcatagtaataagtagctcaagcgtggcttggtttgcttgtctcttgcaccgtagttttgttttttttccccccgcaagtgtgatgcgatgaagtgaat

SEQ ID NO: 13580 - DNA, 385 bp, Bos taurus
  Clone ID: 58-LIB3058-003-Q1-K1-G6
atcgcgagcggccgcactttctttgattttttggcctccgctactctgatcccggctcggatcctgtggttcgggaagagcggcgaagatgcggcccttgaacatcgggaagctggcggaaccggaggaggtggaggtgctggagcccgaggaggacttaggacaagttcctgctgtcggtaatcaacgagattcgcgaggacaatcgatcactttcccgtgagcactggcgggactacctggtgaaccgaagcaagctgtaggaaatggacaatatgctcattcagataaagacgcaagccgaggcctaataggaaagcgcgctcaaccatctgcagaatccggactactgagccgagggccgggggaccaaacggtgcgagaa

SEQ ID NO: 13581 - DNA, 226 bp, Bos taurus
  Clone ID: 58-LIB3058-006-Q1-K1-G6
gttttgaatcaatgttactgctttcaaacttggaattgctacactttgaactggagggtccttctgggagagaactaaacaatgactatcacgcagaaaaattggacggttcggttccaaggccatggtcaatgcagcaacttgtgaggacactgccgtgtgatggcacatatcgacatctgatcagaccagctgtaccctgaccctgctggcttgttgatctgcc

SEQ ID NO: 13582 - DNA, 383 bp, Bos taurus
  Clone ID: 58-LIB3058-008-Q1-K1-G10
cggacgcgtgggattttttagaggaaatcaaagagcaggaggttgtggacaaagtcatggagacactggacagtgatggggacggcgaatgtgacttccaggaatttatggctttcgttgccatgattaccactgcctgccacgagttcttcgaacacgaataaggaaaagaaagcagcggagctgtttctgcagcagagacggagtttgaccaggggaacacaggcagggcttgcagggctgtaggagctgagctttccgtgttgtagctaattaggaagcttgatttgctttgtgagggaacaattgaaacctctttccaaggaccatttttagtgcccccagccttacttctgcattactgggcatagtgttagctttct

SEQ ID NO: 13583 - DNA, 405 bp, Bos taurus
  Clone ID: 58-LIB3058-008-Q1-K1-G6
ggggcctggagctgatggaaggcaggaagcagtatgatgagctctgcatccccttcgtggtcatccctgccacggtctgcaacaatgtgcccggctcggacttcagcgtgggggctgacactgccctcaacaccatctgcatgacgtgtgaccgcatcaagcagtcagcggcaggcaccaagcgccgtgtgtttatcattgaaacgatgggcggctactgtggctacctggccaccatggcaggcctggcagctggggctgatgctgcgtatatttttgaggaccccttcaccattcgagacctgcaggtgaatgtggagcatctggtgcagaagatgaaaacgactgtgaagaggcgcctggtgttaaggaacgagaagtgcaatgagaactacaccactgact

SEQ ID NO: 13584 - DNA, 420 bp, Bos taurus
  Clone ID: 58-LIB3058-009-Q1-K1-G6
cgcacgcgcagcgatcaccgaggcgtgctgagattccagaactggagaacgagggacgacgaagactctactgctgttgatggggctgctgctcagctggcagagtggctggccaatctcggacaaagagctccaggaaatgtccaccgccgggagtaagtacgtgactaaagaaattgcaaatgccctcaacgacgtgaaacagataaagacccaaatagaacagaccaatgaagagcgcaaattactgctcagctccctagaggaagccaagaccaagaaagaggacgccctgaatgacaccagggattctgaaaacaagctgaaggcgtcccagggggtgtgcaatgagaccatgacagccctttggcaggaatgtaagccctgcctcaagcagacctgcatgatgttctacgcgcg

SEQ ID NO: 13585 - DNA, 407 bp, Bos taurus
  Clone ID: 58-LIB3058-010-Q1-K1-G6
agttcagtcactcagtcgtctaagactctttgtgaccccatggactccagcataccaggctgccctgtacatcaccaactcccggagtttgctcaagctcatgtccatcgagtcggtgatgccattcaaccatcacatcctctgtcgtcccgttctccttatgctttcaatctttcccagcatcaggttcttttcaaatgagtcagttcttcacatcaggtggccaaagtactggagtttcagcttcagcatcagtccttccaatgaatatttaggactgatttcatttaggtttgactggtctgatcttcttgcagtcccatggactatcaagagtcttcttcaacaccacagtttaaaagcatcaattctttcgtgctcaactttcttatactccaactctcaca

SEQ ID NO: 13586 - DNA, 414 bp, Bos taurus
  Clone ID: 58-LIB3058-011-Q1-K1-G10
tcgggcaaaagcctaaaaatgacaaacttgtaaaaaaaaattttgtatataaactagctgtgacctgactatcctttgtttttgtaattttcctttgaaaatgaaagggtgcggttcaagatggcactgtgaataattaatgtaaatcagtgggttttctttacttttgtctttggtttggttttggtttcaaaagaaggtattattttcaaagtgccttccaactagaagtaagccatgaccacttttggtacaagagcctaacttcataggaatcacaatctgttgcaaagtgcagtcatttcttgaaattaacctcagtgcaggtcagcatgtgaaatgttaattttgacatctggcaactagggtttggagactgattgatcccatttgcccacaggttcagtgtccttt

SEQ ID NO: 13587 - DNA, 242 bp, Bos taurus
  Clone ID: 58-LIB3058-011-Q1-K1-G6
tcgcgctgagtgtggacatactcaatgaggtgctggaggagtaccccatgatgaggcgggcctttgagacagtcgccattgaccgcctggatcgcattggcaagaagaactcgatcctgctacacaaggtgcagcacgacctcaactctggcgtgtttaacaaccaggagaacgccatcatccaggagattgtcaagtatgaccgcgagatggtgcagcaggctgagctgggccagcgtgtc

SEQ ID NO: 13588 - DNA, 359 bp, Bos taurus
  Clone ID: 58-LIB3058-012-Q1-K1-G10
gggcctccaaggtagaccagtttgtgacacgcttcctactgcgggagacggtgagccagctccaggccctgcagagctcgctggagggggcgtcagacactttggaggcccaggcccagggcccgcgatcagatgaagagagagtggaggtgccaagccggccccgaggcagccggcgggcagggcgcagggccctgcggagtgtcagtcggtcgtacacctggtctgctggctcctgcaacacagggcagagctccgaggctgagatgcaatggcggctccagatcaaccgcctccaggagctcatcgaccagctggagtgcaaggccccccggctggaaccactgcatgaagaggag

SEQ ID NO: 13589 - DNA, 394 bp, Bos taurus
  unsure (374): unsure at all n locations; Clone ID: 58-LIB3058-012-Q1-K1-G6
cgggtagcgtgatctcagccatggcgtccgcggactcccggcggatgggcaatggcggcggtgttggcggagccttccagccatacctggactctttgcggcaggagttgcagcagagggacccgacgctgctgtcagtcgtggtggcgctccttgcggtgctgctgacgctagtgttctggaagttcatccggagcagaaggagcagtcagagagctgttcttcttgtgggcctttgtgattccgggaaaacattgctttttgtcagattgttaacaggcctttacagagacactcagacttccatcactgacagctctgctgcctacaaagtcaataacaacaggggcactaacctgaccttgattgacctncctggacatgagagcctgag

SEQ ID NO: 13590 - DNA, 225 bp, Bos taurus
  Clone ID: 58-LIB3058-014-Q1-K1-G10
tcggcgacccgctgaccgtcatgttgcactgacagctgcactgtccggttagcggccagggtctgaagaaccggttcggggatggttacatgatcacggtgaggaccaagagcagccagaacgtgaaagacgtggtgcggttcttcaacaggaacttcccgtgagccatcctcaaggatcggcaccacacgaaagtgcagttccagcttaagttctagcacatct

SEQ ID NO: 13591 - DNA, 326 bp, Bos taurus
  Clone ID: 58-LIB3058-014-Q1-K1-G6
gctgccgagaaactggtgatgaccgtcgagagataagcgggcgaagcggagcgcatcgcgccgatgcgcctcgaagggtggcatcacgcccaacaggatgaaagggtgcttaaggtcataagcgagatggcaccggcacagagacacccatgattggtgaccgagtctttgtccactacacaggctggctgatcgatggcgccaagttcgactacagtctggaccgcatggtcaggttctccttctacctagggaaaggggaggtcattaaggcttggaatattgctgtagcgaccatgatagtagttgaagtgtgccatatcacc

SEQ ID NO: 13592 - DNA, 451 bp, Bos taurus
  Clone ID: 58-LIB3058-015-Q1-K1-G6
ccgtcctgttcatcgacagctgggggaggggagtgaagagtttgccctccgtgtacaacaggtggtaggggacatgggcagggtggaagtgggttctttctttagggggaaggagaggaacacttgagaaacttccaatcctccaattttccctagttggtggccaaagaattgggccagacagggacacgactcactccagcagacaaagcagagcacatgaagcgacagagacaccccagattgcgccctcagtcagcccagtcttctttccctcactcccctggcccttctcctgatgtgcatctggcaactctggctcagagagtgaaggaggttttaccccatgttccactgggcgtcatccagagagacctagccaggactggctgtgtagacttgaccatcactaatctgcttgagggagccgtagctttcatgcctgaagaca

SEQ ID NO: 13593 - DNA, 377 bp, Bos taurus
  Clone ID: 58-LIB3058-016-Q1-K1-G10
cgggagccgtggcgctgggagctcctgtcaccgctggggcccggccgggcgggagtgctggagacgtgagggctcgagggcccggacatggggcccgccagccctgcactcgtggtctgggcccgctgctgcggttgctgccactgctaatgctgcttcttcgcatgcagctcgccgaacggaacctggccggtgggagccccagcgcggccgaggccccagggtctgcccaggtggctggactatgcgggcgctcaaccattcaccgggacctgcgcaccgtccgctgggaaccagacccacagctctcacgactgtgtctccgggacccgaagtgagtgctggagtactgcaaacagatgtacccggagctgcag

SEQ ID NO: 13594 - DNA, 353 bp, Bos taurus
  Clone ID: 58-LIB3058-016-Q1-K1-G6
tgacgagtgtaacaagaaaggagagtctcacggtgattaatgtctctgcggactctcccctcttacgtacctcttttagtcattttgcttcatagctggttcctgctagaaatgggaaatgcttaaagatggtgactccccaactgcaagtcacaaagaagtggaggctctcattcaattttcaagcatctcccgaggaccaggaagtgttttcttctcaaagggcacttccactgatgaaaacaaagtggaaagaaagatgttcaggtagagagaagggaggcacctgtccctgttgccatcttgggagccaaatatattctctttggtgtacaaaaccgagaactcactcc

SEQ ID NO: 13595 - DNA, 423 bp, Bos taurus
  Clone ID: 58-LIB3058-017-Q1-K1-G10
acgcggacgcgtgggcggaaatttacctagtctggtcatgtcgatatcttatgttctatgattttatgattacgttggtgacagttatccactccagtattctggcctggagaattccatggactatgtagtccatggggttgcaatgagtttgacacaactcagcaactttcactttcagtttagatctttgattgcttacgtgtgattagtgtaaaactgttgattaaacatctgcttttgccttaagcaattattgtatttgtaaactttaacccttagttgattcttgacaatccagtctttgcttgactttaggtcttatgagctgagtgcctaccctctccaggaaggaaactgcaccaatattggttcctgctaaatagcaacttaccttgctttgcatcgatgtcaagtaatatc

SEQ ID NO: 13596 - DNA, 326 bp, Bos taurus
  Clone ID: 58-LIB3058-017-Q1-K1-G6
cggacgcgtgggcggacgcgtggggcaggagcgagaggccagaagctaataaactcgtgcccaggagcaatccctgttgtgactggtccttcttgtctgcctgcccagagtctgcactgcacggtcctgcccagagcaccctatggttttgggcttggaccacgagccctttgagggaagctggtctggaattgccacccctgccctctcagtgtccacaccctctctgttctacagttggctgaagtgtttcagtgcaactgatttttctcatctatgtttattgctcatgtaccaggaagaaaaataaagatgtcacaagggat

SEQ ID NO: 13597 - DNA, 163 bp, Bos taurus
  Clone ID: 58-LIB3058-018-Q1-K1-G6
cggacgcgtgggcggatcaacccctacatgagctctccatgccacattgagatgatccttactgaaaaagaacagattgttcctaaaccagaagaggaggttgcacagaagaaaaagatatcccagaagaaactgaagaaacaaaaacttatggcccgggaat

SEQ ID NO: 13598 - DNA, 444 bp, Bos taurus
  Clone ID: 58-LIB3058-019-Q1-K1-G6
cggacgcgtggggtaatcaccgaggagctgaggtatttggagcccttaaaatgcctgattacctcggtgctgatcagaggaaaactaaagaagatgagaaggacgacaagcccatccgagcgctggatgaaggggatattgccttgctgaaaacttatggtcagagcacttattctaggcagatcaaacaggttgaagatgacattcaacaacttctcaagaaaattaatgagctcactggtattaaagagtctgacactggcctggccccaccagcactctgggatttggctgcggataagcaaacactccagagtgaacagcctttgcaggttgcgagatgcacaaagataatcaatgctgactcagaggacccgaagtacattatcaatgtgaagcagtttgcgaagtttgtggtggaactcagtgatcaggtagcaccta

SEQ ID NO: 13599 - DNA, 326 bp, Bos taurus
  Clone ID: 58-LIB3058-020-Q1-K1-G6
cggttcttagggaagcgagggtgcttagcaaaagaagtggatggagccagcgtctagatccaggaagcctaccccttcccaacagagggaaaacaaggattaaataataaaaggaagccaaggaaagtaaagtcttccctcatagctcagctggtaaagaatccacccgcaatgcaggagaccccagtttgattcctggggtcgggaagatctgcgggagaagggacagactacccactccagtattcttgggcttccgttgtggctcagctggtaaaaaaaatccgcctacaatgcaggcgacctgggttcgatccgtgggttgg

SEQ ID NO: 13600 - DNA, 417 bp, Bos taurus
  Clone ID: 58-LIB3058-021-Q1-K1-G6
acgcagacgctagtgcatatgaatgatctactgacctaaggagcaccagacgctagtggctaacagcgtaaactgtgccagccctatgggagacacaggatagataactttttggatagcatgttgatctctgctaatgagtggtgcacttcggactctgtcatatcttcacaacggtgctctggtcatgggctattagccattcacgcatagcaggtaatctgaagatcttgataggactcagaacgatgcacattttgtattctacagctcgtctatcagtcgtttggggttgtaccagaaaggactggacaatgattcaatgattatgattggtctgacatatgcaagttggacattaaacaacacaaatgatatgtaaaattggctagttcttgcatctgttgggatttttga

SEQ ID NO: 13601 - DNA, 468 bp, Bos taurus
  Clone ID: 58-LIB3058-022-Q1-K1-G10
ggttgagacgggtccagcggccagaaaatgcgtctggaggctccagtcccagcgggccctcgaagtctgatgccaaccgggccagcagtgggggtggcggtggaggcctcatggaagagatgaacaagctgctggccaagaggagaaaagcagcctcccagacagacaagccggcggacaagaaggaagacgaaagccaaacagaagagcccagcaactctccatctccagggacccgagcagccagccagcagctccccaactcgtcagaggccagccggaagccctgggagcggagcggctcagcggagaagcccgtgtcctcctcgctgtccaggatgaagccggcagggagtgtcaacgacgtggccctggatgccttagacttggaccggatgaaacaggagatcctcgaggaggtggtccgggagcttcacaaagtgaaagaggagatcatcgacgccatca

SEQ ID NO: 13602 - DNA, 260 bp, Bos taurus
  Clone ID: 58-LIB3058-022-Q1-K1-G6
gtgggggatactatggtactgtgatgcagtttatccaaatgttcatagacgaacatcaacccagactatagagaagaaaaaaaagtctggtaaaaagaccaggtctgcagtattagaacagaacttcaaagagtctttaatggaggttgaaaacatactagagattgactgtctacgtctttgtgaccctgagcacagaattgtgtgtgaaggtacctactggcatgtgtgttcacggctctgtctcaccaagacaacca

SEQ ID NO: 13603 - DNA, 301 bp, Bos taurus
  Clone ID: 58-LIB3058-023-Q1-K1-G6
ccggcgagcccaatgtgcccggcacgcatgtggatagtggggaatcaaggttggaaggttggaaataaggacatgcagtgggccgtccaggctcccttgtagcctgactggaaaggggggagaggcgaggcgagcccaacctgaggaggcgtgtcccagttaggcctggtcttgggatggctgcaatgattagccctggggattataatgacatgaagattcttattgcacttgtattttttgtataaaagttggcatgggttctaataaagattaaaatgtaacaggttggagtgaaatg

SEQ ID NO: 13604 - DNA, 442 bp, Bos taurus
  Clone ID: 58-LIB3058-024-Q1-K1-G6
cttcactaaaaataaccctcccgtacacgtatttcgagactgaatatgaagcctgtaaaagaccaactgactttttagttgtaatgaaccgtcagtgattttgcacggttgacacacctgtgtgtactgcaggccaggactcggcagaggacatattctaggtttactggtatatatagaaacaggagtttgcttgtttatatgttccacactcaaaaaggcataatcaaaatgtttctaaataatgattttacaaaaaccatcatttacataatttgtataaaaagcttaatacaattttaatcaaaattttaagtaattttaaaaatgctttaagattctatatttctggagtacctatgaagtggtatgactacatcatgtgaaatatctattttcttctttaactatggagtagcagtttttattttaattaaataaa

SEQ ID NO: 13605 - DNA, 416 bp, Bos taurus
  Clone ID: 58-LIB3058-026-Q1-K1-G10
caaccaggcattattttaaaagatttgcttccatatcaattctgttgccttgctctgaggtttggtcttcccgggctctcagccagagaccagcaagtgttgggaagcacttggtacccagactaagctactgtaggagtgcacacgtggcagctcccattatgcctcctgttttacatggaaaatgttcatcgaaaggcaacagcccccagtagtaccagcagtgtagtgacctcagactctcaaactcgccactagaccgtggctgccagattgtatgtgttactatgccaggggccccatggccccactgctactgttggtgcctctgtcagctacactgtctgtctacctaacactaggctctgctcagaaaacatatatcctgcgttcaagagagagatgatgcagaatgc

SEQ ID NO: 13606 - DNA, 416 bp, Bos taurus
  Clone ID: 58-LIB3058-027-Q1-K1-G6
ctcagctggtaaagaatccacccacaacacaagagacctgggcttgatccataagtggggaagatcccacggcagagggaatgactacccactccagtattatggcctggagaattccaaggatacagcccatagggtcgctgaatcagacacaactgagctactttcactttcactttcaagtggattatatagaatatatatttttaaaggtacgttctatgattcttttgttatagttttacaagaacagtcataagggcatatgcagatacacttcaaaataagtttatataggatcactgaatcaatcacattcacttgagcgaaaaatatgaaagtcagtgtcctacataacctgtatgcctgtgcaccaaaaagcatgtataaaagccttaattccattgatattaaaa

SEQ ID NO: 13607 - DNA, 432 bp, Bos taurus
  Clone ID: 58-LIB3058-030-Q1-K1-G10
gttgcgctaacaaacacaaggccgattggtgttcattcagggcacgggtactactggtatcactgaatgcatgtcttttgattgaaagagtggttttgctttctcccccaaagtgatttcaacaacatttaaggagatgtaaaatcggtaccaaaaaaacacttgatatttgttttcagcgaagtatacaatataagcttccaggctgcatataaccagaagatggaaaatggtctgtaagaaaccaatcaagatcaaggaaagcccctgaatccataccttgtagtccgttttgacttaatactattacagataaccaaccctttcccaaaaactctctatgtatacatacacacatatacacatatgaacagagtgaatcaactgaaagtgcctgcttcatttctgatatagacattcaattttaacaca

SEQ ID NO: 13608 - DNA, 426 bp, Bos taurus
  Clone ID: 58-LIB3058-037-Q1-K1-G6
ggagaggctggcggggtggctttgcttgacttggctgacgcctgtcttcccgtcctgacacagagtagaggcttctcccgaaagagccagacgttcctgcccaaggtcttcttccgcaaaatgtcatcctcaggggccaaggacaagccggagctgcagtttcccttcctgcaggatgaggagacggtggccacgctgcaggagtgcaagacgctcttcatcctgcgaggcctgcctgggagcggcaagtccacgctggcccggttcatcgtggacaagtaccgggatggcaccaagatggtgtctgccgacagctacaagatcacccctggcgcccggggatccttctctgaggagtacaagcagctggacgaggacctggctgcctgttgcccccgggatttccgggttctggtgctggatgat

SEQ ID NO: 13609 - DNA, 401 bp, Bos taurus
  Clone ID: 58-LIB3058-038-Q1-K1-G10
ctcacttcaacagctgtgatccattatgtttacctgagtatcctgtgtcccagtggggaccaagcaagcaaggcaggacaaggactgtcctctttaaaggcttctaaagaggtcggctaccaatatccaaggagctggtggcccagcttattgattaccaagccaaacccttcctttcctttggcctacagcaagccttgtttggaccacagaaaggagtcgaaagacatgatgaaactgcaatcaattaactgacctacaagcttctttagtaaaggcttggtgggaatatgagactacaacgatgtaatggatcacttataatccatcttttctttcttatcttccttctgatctcagcaaggcatcagtaagcagtggcatgaagcaagatcttaatt

SEQ ID NO: 13610 - DNA, 330 bp, Bos taurus
  Clone ID: 58-LIB3058-038-Q1-K1-G6
acccactcgtccgtctgtatcgcgagctgtcgcccatccagtctttattcttttttttttttttttgggtggtgatcctctcatcattgaggctatgtattaatagacattatagtaaacccacgcgaaatattcagaattagatggggattatagagccacgtctgggcgttactgtgactaatcctgattttcatcctatgggggactgtgacccctggcatgtgtcttctccacgctccggtggatgaccccctgagctcaaagctgcccttttagcgattgaaccccactcataatgtcatgaccatcctactgagtgtcatcttc

SEQ ID NO: 13611 - DNA, 400 bp, Bos taurus
  Clone ID: 58-LIB3058-039-Q1-K1-G10
aagaaatgctgttattagttgttttattatgagatccaaccagtccatcctaaaggagatcagtcctgaatattcttgcaaggactgatgtggaagctgaagctccaatactttggccatcttgtgtgaagaaccgactcattggaaaataccgattctgggaaagtttgaaggcgggaggagacggggacaacagaggatgagatggttggatggcatcaccaactcaatggacatgcatttgtaaaaccttcaggagttgctgatggacaggaaagcctggcatacttcagaccatgggattgcaaagagtcacacacaactgagcaactgaactgaactgatgttgatattttcataaaatttgaaaaacagtgtagatgcatgaaaatatatgaat

SEQ ID NO: 13612 - DNA, 290 bp, Bos taurus
  Clone ID: 58-LIB3058-040-Q1-K1-G6
cggctcgacccacgcgtgcgcggacgcgtgggttgctttacctatattccgaccctcataaagacaaaccaaagcaggggagcaacctattacaaacctaccagaagggaaacgtggcagcagaagctaatggagaagaacccaaggcaagctggcccagacatttagccatgcaccattctgttaccttgcgagtctgataataaacttgctgctgacctgctgtgctcacagtagattctagactggactaattattgtggggttatagtgagacgcctaagtttgga

SEQ ID NO: 13613 - DNA, 430 bp, Bos taurus
  Clone ID: 58-LIB3058-043-Q1-K1-G6
gcggagttcaagcgtaaacacaatatggttatcagtgaaaacaagagggctgtccgtcgcctccgtactgcttgtgagcgtgctaagcgcactctctcttccagcacccaggccagtattgagattgattccctctatgaaggaatcgacttctatacctgtattacccgtgcccgatttgaagaattgaatgctgacttgttccgtggcaccctggaccctgtggagaaagcccttagggatgccaaactggacaagtctcagattcatgatattgtcttggatggtggctcaacccgtatccccaagattcagaaacttctccaggactacttcaacgggaaagatctgaatctgagcatcaaccctgatgaggctgttgcatatggtgcagctagccaggcagacattgtgtctggagacatatctg

SEQ ID NO: 13614 - DNA, 443 bp, Bos taurus
  Clone ID: 58-LIB3058-045-Q1-K1-G6
gtgtgccgccgggacacaggtgtcgtgtataccaccgttaaacctaagccaaaatgggaaaggagaagacccacatcaacatcgttgtcattgggcacgtagattcagggaagtctaccacgactggccatctgatctataaatgtggcggcatcgacaagagaacaattgaaaagttcgagaaggaggctgccgagatgggaaagggctccttcaaatatgcctgggtcttggacaaacttaaagctgaacgtgagcgtggtatcaccattgatatctccctgtggaaatttgagaccagcaagtactatgttaccatcattgatgccccaggacacagagacttcatcaaaaacatgattacaggcacatcccaagctgactgtgctgtcctgatcgttgctgctggtgttggtgaatttgaagccggtatctgcaagaac

SEQ ID NO: 13615 - DNA, 429 bp, Bos taurus
  Clone ID: 58-LIB3058-046-Q1-K1-G10
gttctagatcgcgttcggccgacctttttttttttgttttttttaaattttgagattgttcatttgaaggtaaatcttaatgctattaagttcacaaatatgctaatttaaatacccaattctattatctaaaacacacattgcaaacatacaaatatctattctctccacatgtcagagccattcatttcatggtttggaaatggggagaatagattccccttaaactgcaagtcagcaggtgtttctttacagttaactttagcaaaattcatacaaaatagtaattaacaatgatcttctttacttgttaactcacaaggaaacaccttcaaaactgcattttgttaaagtttctgtactaaaatgtagaaaaactgaactacacaaatattgaaaagttaaaaattccttaattttttattcctg

SEQ ID NO: 13616 - DNA, 339 bp, Bos taurus
  Clone ID: 58-LIB3058-047-Q1-K1-G10
cggacgcgtggggcggaggaagctccttttggggagctgcgaagatgctgtccgtgcgcgtcgccgcggcggtggcccgcgccctccctcggcgagcggggctggtctccaaaaatgctttgggatcatccttcattgctgcaaggaacctgcatgcctctaactctcgtctgcagaagaccggcactgctgaggtgtcctctattcttgaagagcgtattcttggagctgatacctctgttgaccttgaagagactgggcgtgttttaagtattggtgatggtattgctcgggtacatgggctaagaaatgttcaagcagaagaaatggtagagtttc

SEQ ID NO: 13617 - DNA, 421 bp, Bos taurus
  unsure (267): unsure at all n locations; Clone ID: 58-LIB3058-047-Q1-K1-G6
tcgcaggccctcccctgccttcttatgtacaggcacagagcccgcgggaaagggctcgcttctgaagcatctttgctctcttcccccaccacccctggagctcagagggcactccggcccccacagctccctggcccagccctctgaacacctgtcccgagggccctgcgggggagcccagggtcagagaagacccctgccccgcccaccagctcttttctagccatcccctgccagggcgcggggctgtgtttggctcagctcctncgctgggtggtcgcacaggtgtatgtatggtttgtacgctggccaatgactgtacatagtgtatgaaagttatttaagctcatgctgtacatttctgttcccagacaggatgtgagtgttcgaaaaagctggcgtgaataaaactcggatggtc

SEQ ID NO: 13618 - DNA, 375 bp, Bos taurus
  Clone ID: 58-LIB3058-048-Q1-K1-G6
tctagatcgcgagcggccgccctttattattttttttttttttttttttttttttttgtttttttttttttttttttttttttttttttattttttattatatttttgttcttgttttttatatgggaaacggtggaaaaaggcccgttttaaaaaaaacaatgctaaaagcaaagacagggggccaaaaaaaggggtttatccgaaaaaaaaataccaggggggaaaaacaaaaacgactcgaaaaaatcaaaaaaggaccatagcgggaaaaacaaggggaacatgaagcccaatagggaacaccagaccgagactaaaagaaactagatggaacaagacccgggaccatacttccgagaattatttccgggc

SEQ ID NO: 13619 - DNA, 428 bp, Bos taurus
  Clone ID: 58-LIB3058-049-Q1-K1-G10
cggacgcgtgggatagagcctgcttgataagtcaatggcaccccacgccagtactcttgcctggagaattccatggacggaggagcctggtgggctgcagtccatggggtctctaagagtcggacaagactgaagcgacttagcagcagcagcatagagcctgccagaaggataaggtgtcaggaagggcattgcagctagagggagcaccttgatggagaaacaggagcagtcaggtatgctggaggaactagaggcagttctgggtggcttgagcaggcgctgtgtggtgtgggtcatggaaggccttacagggcctcggcggccagaacacatccttggggcttgactccaagggcactgggaagccttcagagggttttgaggagaaactactcaggctcatcttggtattttacaaacaccac

SEQ ID NO: 13620 - DNA, 415 bp, Bos taurus
  Clone ID: 58-LIB3058-050-Q1-K1-G10
agatgttgatcctaactaccaagaggaatatggtgcaaacattgatctagactcccaaaggaagggcaagtgcgcagtgatcaaaacctctacgcggcagacctacttcctgcctgtgattggcttggtggatgccgaaaagctgaagccgggagacttggtgggtgtgaacaaagactcctatctgatcctggagaccctgcccaccgagtacgactcgcgggtgaaggccatggaggtggacgagaggcccacggagcagtacagtgacatcgggggcctggataagcagattcaggagctagtggaggccattgtcctgccaatgaaccacaaggagaagtttgagaacttatggatccagcccccaaagggcgtgctgatgtacgggccttcaggtacagggaagaccctg

SEQ ID NO: 13621 - DNA, 305 bp, Bos taurus
  Clone ID: 58-LIB3058-051-Q1-K1-G6
gctaaaattgatcctttagcacctttggataaagtttgccttctgggttgtggcatttcaactggctatggtgctgctttgaatgctgccaaggtggagcctggctctacttgtgctgtctttggcctgggaggagttggattggcagttatcatgggctgtaagatggctggtgcagcccggatcattggtgtggacatcaataaggataaattcgcaagagccaaggagttcggggcctctgagtgtattaacccccaggacttcagtaaaccgatccaggaagtgctcattgagatgactga

SEQ ID NO: 13622 - DNA, 115 bp, Bos taurus
  Clone ID: 58-LIB3058-053-Q1-K1-G6
ggaggctatgatgattataatgtctattatgatggctatggatttgggtcagatagattctgaagagacctcaatcactgcttttcaggaatgtcagatcactgatacggtgatg

SEQ ID NO: 13623 - DNA, 358 bp, Bos taurus
  Clone ID: 58-LIB3058-054-Q1-K1-G10
ataaaatattggagcatagactgagactttcacttcaactgcaacagccttggcctgggccttttctcagtgcttcgcttctgacctgcatgtctagttctgtattgctgtggcttccatggacgaatgcaagtcccactatggatagccccttgcatttagacagttgtgatcaacagactgcctttgggacaccttgctatcaaatcaaggataaagaatctagttgatctctgcagattccttcctataactatgtataggtagtcctgactccactacccgcttccgaaatgggctgttcacgcggaagaggctcacgtttcacacagcacatcccgagagaatggagtgaact

SEQ ID NO: 13624 - DNA, 448 bp, Bos taurus
  Clone ID: 58-LIB3058-057-Q1-K1-G6
gagacttccagccttcttgccaaattcagacctctggttgatttttctttgatagaagatggaattgttttccaatttcccacattaatttaccatgtacataattttgctttaagagaaaaaccaaacattttaggagaattatagccagtcttcaaatataaccattctatcccactttttttctttctttctttttttgctttggaatttagtggaaaaaatacacaaaagctgtcactgatcagctggctctttaaatagataagtacctttctccatccattattctcagtgatgaccacagagcccaaatatcacaggaaaaccaatatttacattataggttgctcctgtccttccagacacctttcctacctgtgtgactaacctaattttgctagttccataaatacacaattagtttagaaacagccatcacaatgta

SEQ ID NO: 13625 - DNA, 449 bp, Bos taurus
  Clone ID: 58-LIB3058-058-Q1-K1-G6
ttcacatttaaaactttggctttgtagatcatgtgatttgatcctctccagtcttattataacaggatgattttatttttttgctgtgctgaatagcgtgtgggattttagttccctgaccaggaatcgagtgcacaccgcctgcagtagaagcatggagtcttaaccactggacctccagggacgtcccagtaggatgatttttttagagatagtttttgaataggtagtacttgcaaaattagaacattcagaggatacaagagaatgagatgtatttgtagtacagtgtactgttttagtaaccactagatatgtaaatacaaatcggtatttggagacaaaccaaactgctcttagaccatttgtagagggctttaacctctactcatcatgtcctgaacatgtcctggaatgcaggttagtgtaagtctaacgtctaaagttaa

SEQ ID NO: 13626 - DNA, 383 bp, Bos taurus
  Clone ID: 58-LIB34-002-Q1-E1-G6
atcggatgtctcaactcagatggaatactgccgcaccccgtgtactgttacttgcaatattcctgtggtgtctggcaaagaatgtgaggaaatcatcaggaatggaggtgaaacatctgaaatgtacctcattcagcctgaggattctagcaaaccatatagagtatactgtgatatgaaaacggaaaaaggaggatggacagtaattcagaaccgtcaagatggaagtgttgactttggcaggaaatgggatcaatataaacaaggatttggaaatattgcaacaattgcaaaaaggaaaaaattacgttggtgtacaagttaattattggtccggaatgacaaaattaaccaacttaacaataatggaaccaaaaagcctt

SEQ ID NO: 13627 - DNA, 415 bp, Bos taurus
  Clone ID: 58-LIB34-003-Q1-E1-G6
ttgcattctgccaccaactcgcccaactgacaaacccttgcgtttgcctctccaggatgtctataaaattggtggtattggtactgtccctgtgggtcgtgtggagactggtgttctcaaacctggcatggtggtcacctttgctccagtcaatgtaacaactgaagtgaagtctgtagaaatgcaccatgaagcattgagtgaagcccttcctggggacaatgtgggctttaatgtcaaaaacgtgtctgtcaaagatgtccgtcgtggcaatgtggctggtgacagcaaaaatgatccacccatggaagctgctggcttcacagctcaggtgattattttgaaccatccaggccaaatcagtgctggatatgcacctgtgctggattgtcacacagctcacattgcttgcaag

SEQ ID NO: 13628 - DNA, 370 bp, Bos taurus
  Clone ID: 58-LIB34-004-Q1-E1-G10
gctgcatctgcatcagacgaaagtggtgttggtcactttcggtggcgatggacatgccacgcgagactctgtatctcaaggaacatgattagcaccaggaagtctcacatagcctggaaccagtactagtggaaatgtgaaccctgcgagctacggacctgaaagtagtggcacttgcaaccccggacgccctgagcccggaagtgctggcatctggaacccctgtcgccccgagctcggaagtgctggcacctgtaacccctgccgccccgagccctgaagtgcttgcacctgaaactccgggagccccgagcccggaaatcctgggaccggtaaccccggctgccccgagcctggaagtgctggcact

SEQ ID NO: 13629 - DNA, 416 bp, Bos taurus
  unsure (293),(357): unsure at all n locations; Clone ID: 58-LIB34-005-Q1-E1-G10
ctgaagccccaagtgttacagttctgacattccaggctcggagccccgggcccgccgacaccatgagttggtcctcgcaccctccgagtgtaatcttctacattctttcattgctttcttcagcatgcctggcatatgttgctacccgagacaactgctgcatcttagatgaaagatttggtagttattgcccaactacctgtggaattgcagatttcctgaataattaccaaaccagtgtagacaaagatctacgaactttggaaggcatcttatatcaggttgagaacaanacatcagaagccagagagctggtcaaagcaatccaaatcagctataaccctgatcaaccatcanagccagataacatagagagtgctaccaagaattccaagagtatgatggaagaaattatg

SEQ ID NO: 13630 - DNA, 413 bp, Bos taurus
  Clone ID: 58-LIB34-005-Q1-E1-G6
gcttgtaagtatccaagtgtgtagtttagtggaagtttgagcaaggtgttagattttgccttaaaatgtctgctttaattcgtaacaagaaagttatcaattgggattcattcatattttccctgatttttagcttcttaccattttatctcttcttaacaggagcctgagcacaaggtttaatgtggaactgaggctttaaacttaagtgcgtgtgtatatatgtatatgcatgtttgtacaaatctccatgatgtttgccaagtttgagggccaaaacttggaagataaagacaataaagaataaaagtagtgactcaaagtagttgttcaaatagataattaaaaaaaaaaaaattctggtaaccattctcgttgaagcaaataaaagatttgtaaaacagcttaaaaat

SEQ ID NO: 13631 - DNA, 405 bp, Bos taurus
  Clone ID: 58-LIB34-006-Q1-E1-G6
gaagttttgaatatttgaatcctggaattcttccctgtttgagaatatcctcctgttcccttcaaccttgaatgagatttctgaagtcggtctggatagtttctgttctgcttctttttatctgtctcctgcctcatctgttttagccagttgtttttgctgtttggtttcgaagttgtgtccaactttttcgaccccatggactgtagcttgccaggctcctctgtccatgggattctccaggcaagaatagtagagtgggttgccatgccctcctccaggggatcttcttgacctaaagattgaacccctggcccttgaatttggaaggcgatttctttacaatagtgccacagaaaagcccgatgctttgggaaaaacagccaattcatcagtctagtagct

SEQ ID NO: 13632 - DNA, 411 bp, Bos taurus
  Clone ID: 58-LIB34-007-Q1-E1-G6
gccaagcagacttgcagcagaagccaggagaggccctcctgccccccagccccgggtcaccatggggattggtcacaacccccgactctgcctggtacccttgatcctgggcctcttgtgtggaggtgtgggcatgacgccattgcctgaggctgggccccaaagcccctgctctctggagggagtagagatcaaaggtggctccttccggcttctcaaggcgggccaggtgctggagtacttgtgtccttctggcttctacccataccccacgcagattcgcacctgcagatccacagggtcctggagcaccctgcagactcaagacagaaagattgtcaagaaggctgaattgcaagcaattcgctgtcccagaccacaggattttgagaatggggagtactggccccg

SEQ ID NO: 13633 - DNA, 422 bp, Bos taurus
  Clone ID: 58-LIB34-008-Q1-E1-G6
cttcattacaacaattatcaacataaagccccccgcaatgtcacaataccaaacccctctgttcgtatgatccgtaataattaccgccgtactactactactctcgctccctgtattagcagccggcatcacaatgctattaacagaccggaacctaaatacaaccttcttcgacccggcaggaggaggagaccctattctatatcaacacttattctgattctttggacaccccgaagtctatattttaatcttacctgggtttggaataatctctcatatcgtgacctactactcaggaaaaaaagaaccattcggatatatgggaatagtttgggctataatgtcaatcggatttctaggtttcatcgtatgagcccaccatatattcactgtcggaatagacgtcgacacacgagcct

SEQ ID NO: 13634 - DNA, 221 bp, Bos taurus
  Clone ID: 58-LIB34-009-Q1-E1-G6
gctgtctgtcccagaccatggggaaactgttggtgctcaccctcttgggactggggctggcattcttcagggattaccggtcttcttatctagcaagaattaacgcctccccaaaagttaaatccggagaactttctaactggtaatttattaaagggattgcaaatggtgctgaagaactggagaaaatttcctatggactccctttcaataattccggg

SEQ ID NO: 13635 - DNA, 407 bp, Bos taurus
  Clone ID: 58-LIB34-010-Q1-E1-G10
agggcctctccagctcaccatggctcgggcattgagagtgccagttgcactgtggctgttgggcttgtgctggtctttggctaaagcccaccctctggctagagctcctgagcttgggcacggagttgaaggtgggaatgtggccaagccggatccagaagtgacggaacgctgctcggatggctggggctttgatgctaccaccctgaatgagcatgggaacatgctgtttttaaaaggggagtttgtgtggaagggtcatgcctgggcccggcagttgatctcagagatgtggaaggatgcccccagtcccgtggatgctgcattccgctatgatcgtaacagtgtccttctgatcaatggggacaaattctgggtatatcctcctgagaaaggcgaggaatatc

SEQ ID NO: 13636 - DNA, 430 bp, Bos taurus
  unsure (332),(354),(365): unsure at all n locations; Clone ID: 58-LIB34-010-Q1-E2-G6
ctacagagaggatgatatgcttttgtgattacgcaaaagcggaaagtaagacatgaagccatgatacaaattgatgaacaaaaaatgcctacaggcttctcatgtctttattctgaagagctttaatatatactgttgtagtttaataggcattgtaagtagaaggcgttagtttcgcatgtttatgcctgaggaacttttccagatgtgtgtgtctgcatgagtgtttgtacatagatgtcatagacgcagaaacggttctgctggtacgatttgattcctgttggaatgtttaaattacactaagtgtactactttatataatcaatganattgctagacatgttttagcangacttttctangaaagacttatgtataattgctttttaaaatgcagtgctttacttttacacaagaggagctttgc

SEQ ID NO: 13637 - DNA, 433 bp, Bos taurus
  Clone ID: 58-LIB34-012-Q1-E1-G10
aaccgatcaactccaaaagccagctgatcactatatagtacagcagaatgacccagtattgacagaaggaagcacataaaatcttacaactcaatttgtaagctttactttagaattttaagatgaggcaatatcaagatatttacaaaagaactataaatacgtgtaagagtgagcttccaatttatgggttgatttccagtttaattgacaacactgaatacctaggtcaaatgtccactcccaattcctcaaatagtataattgtattattagaacattttaaaatgaggaagacccactaaaaaagtgaaagcatctttccatcagaatccactcatttagagataaggaaaaactctcccaatactcaccctactcacacacacacacacacacacacactcatcctaagagtccaatggaatattga

SEQ ID NO: 13638 - DNA, 438 bp, Bos taurus
  Clone ID: 58-LIB34-013-Q1-E1-G6
ttcgccggtcgacccacgcgaccgggtggcgggagcggtgtctcggactccttagggaggcagagctgagcacacggcagaccccctgggagacctcaattccaaccagctgactctcctgtgccccccgtgcccaccatgcatcctcagtcagttctgcacagcggctacttccacccactgctccggaactggcagacagccgccaccagcctcagcgcctccaaccttatctaccccatctttgtcacggatgttcctgatgacaaacagcccatcgccagcctcccaggagtggccaggtacggtgtgaaccggctggaagagatgctgaaacccctggtggaagagggcctgcgctgtgtcctgatctttggtgtccccagcagagttcccaaggatgaaccgggcttcgcagccgactccgaagactccccg

SEQ ID NO: 13639 - DNA, 267 bp, Bos taurus
  Clone ID: 58-LIB34-014-Q1-E1-G10
cccgggtcgactcacagcgtccgaccccacataactttggcacaatgaagtgggtgacttttatttctcttctccttctcttcagctctgcttattccaggggtgtgtttcgtcgatatacatacaagagtgagattgctcaacggtttacagatttgggagaagaacagtttaaaggactggtactgattgccttttcacaatagctctagcagtgcctaattggcatacatgtccggttttggcacgagcaaactgtctgggcat

SEQ ID NO: 13640 - DNA, 341 bp, Bos taurus
  Clone ID: 58-LIB34-016-Q1-E1-G10
gtacaagtggaaccgaggcatttactggacaaagtcatgttaccgtaatggttacttgcttgtgcgttaccacactgtgttataatttgcttcattaccttgctctttgatacatagtgtgcatttctctgtcactgtaatgattataatgacaaattttcatcttactgcacaatcaaaatggcattgataggaatgaactccagaggctgggcctgacagggaggttggtcactcatgcccggtgctcagtcgtatgacctgtacctctcaacttttgccctatctgttaaatatatgcgatgtcattaaatgcttttaaatctaaaaaaagtgacgtc

SEQ ID NO: 13641 - DNA, 402 bp, Bos taurus
  Clone ID: 58-LIB34-017-Q1-E1-G10
cgttttccacggtggttccactgaaacggacctatgagcccggggagcagatagtcttctcctgccagccgggctacgtgtcccggggagggatccggcggtttacatgcccgctcacaggactctggcccatcaacacgctgaaatgcatgcccagagtatgtccttttgctgggatcttagaaaacggaacggtacgctatacaacgtttgagtatcccaacaccatcagcttttcttgccacacggggttttatctgaaaggagctagttctgcaaaatgcactgaggaagggaagtggagcccagaccttcctgtctgtgcccctataacctgccctccaccacccatacccaagtttgcaagtctcagcgtttacaagccgttggctgggaacaact

SEQ ID NO: 13642 - DNA, 414 bp, Bos taurus
  Clone ID: 58-LIB34-018-Q1-E1-G6
agctcagttaagtccaaagcgaaggatgatttcttgcaacttcgaaaaatttaaaaccatgaaacatctattactgctacttttctgtgcttttatagttcaggcccaatttcctactgactatgacgagggacaagatgacagacctaaggtaggtttgggtgcccgcggtcatcggccctatgacaagaagaaggaagaggcccccagcctgagacctgtgccccctcccatcagcggaggtggctatcgggctcgtcccgccacagcaactgtgggccagaagaaagtggagagaaagccccctgacgctgatggctgcctgcacgcggacccggatctgggtgtgttgtgtcctacaggatgtaagttgcaagatactttggtaagacaggagagaccaatccgaaagag

SEQ ID NO: 13643 - DNA, 401 bp, Bos taurus
  Clone ID: 58-LIB34-019-Q1-E1-G10
aggttctagatcgcgagcggccgcccttttttttttgtttttttttttttattttttatatattttttttttaatggcatactgcaaaatttgttacaagaccacagtggctgggacaatactttgaatggttcatccaaggaaacatgccatttggatcgtggttccaccacattccgggctggctgttcatgaaagacaaggataacttcctgatactgatttactaagacatgaaatgggacacgaggaacactgtggacaagatctgccaattcctgagcaacaacctagaaccagaccaactgaactcagtcctcaaaaacaattctttccaaatcatgaaagtgaacaataagtccaaattttcccccctgaagggtcaataatttacaggaaaa

SEQ ID NO: 13644 - DNA, 350 bp, Bos taurus
  Clone ID: 58-LIB34-020-Q1-E2-G6
atacattgaggatgatatacttatgtaattacgcaccagaggaaagatttacatgagaccatgatacagattgatcatgagaatctgcctacacgcatctcatgtcattagtctgaacagctttaatatatactgatgtgatttaataagcattgtcactacagtgcgttagattcgcatgtatatgcctaaggaacttttccacatgtgtgtatctgcatgagtgtttgtacatagatgtcatacacacataaacagttctgatgatgctaattgaatcgtgttgaaatgtttatattacactaagtgtactactttatacaatcaatcacattgctagacatgtttta

SEQ ID NO: 13645 - DNA, 379 bp, Bos taurus
  Clone ID: 58-LIB34-021-Q1-E1-G6
cacagaccccatctgtggggtagggaacatgtctgccaatgcctctgcccaggagaggacaccctggcacgtcactattaagcccaagagccaggagacctgccggggggccctcatctccgaccagtgggtcctgacagccgctcactgcttccgcaatgccgaggaccgcacgctgtggagggtcagtgtgggggatcccaactttcaggggagcaaagaattccaaattgaggaggcagtgatctccccaggcttcaatgtcttttccaagaagagtcagggaatcccagagttctatggcgatgacattgctttgctaaagctgacccagaaagtgaagatgtccacccatgctaggcccatctgcctcccctgc

SEQ ID NO: 13646 - DNA, 440 bp, Bos taurus
  Clone ID: 58-LIB34-022-Q1-E1-G6
aaagaactttcttatctgtgatggaacagacaattggaaatacaaagagttttgtgtcaaaaaacgatgtgaaaacccaggagaattacttaatgggcaagtgatagttaagacagattactcttttggatcagaaatagaattcagctgttcagaagggtatgtcttaattggctcagccaacagttattgtcagctacaagataaaggagttgtctggagtgatcctctcccacaatgtataattgccaagtgtgaacctcctccaaccattagtaatgggagacacaatggtggcgatgaagacttctacacatatggctcttctgtcacctacagctgtgaccgtgacttctcaatgttaggcaaagcctccatttcttgcagagtggaaaataagacaataggtgtttggagtccaagccctccttcctgtaaaa

SEQ ID NO: 13647 - DNA, 196 bp, Bos taurus
  Clone ID: 58-LIB34-024-Q1-E1-G10
ctataatgattcttattacacataatacttccgggatttatatcccatcgtggtgacttcacacgccatagtggtactggtcgcgagtccatctatgacgagaaatttggggggaagaggttcattttgaggcataaaagtcctgtcatcttgtccatctcacattcgggttccaaggtacattagtcccagtttt

SEQ ID NO: 13648 - DNA, 428 bp, Bos taurus
  Clone ID: 58-LIB34-024-Q1-E1-G6
taaaataattggtaatacaaagagttttgtgtcaaaaaacgatgtgaaaacccaggagaattacttaatgggcaagtgatagttaagacagattactcttttggatcagaaatagaattcagctgttcagaagggtatgtcttaattggctcagccaacagttattgtcagctacaagataaaggagttgtctggagtgatcctctcccacaatgtataattgccaagtgtgaacctcctccaaccattagtaatgggagacacaatggtggcgatgaagacttctacacatatggctcttctgtcacctacagctgtgaccgtgacttctcaatgttaggcaagcctccatttcttgcagagtggaaaataggacaatacgtgtttggagtccaagccctccttcttgtgaaaaagtcatttggtgt

SEQ ID NO: 13649 - DNA, 386 bp, Bos taurus
  Clone ID: 58-LIB34-025-Q1-E1-G6
caaaactttggcacaatgaagtgggtgacttttatttctcttctccttctcttcagctctgcttattccacgggtgtgtttcgtcgagatacacacaagagtgagatgggtcatcggtttaaagatttgggagaagaacattttaaaggcctggtactgattgccttttctcagtatctccagcagtgtccatttgatgagcatgtaaaattagtgaacgaactaactgagtttgcaagaacatgtgttgctgatgagtcgcatgccggctgtgaaaagtcacttcacactctcgttggagaataattgtgtaaagttgcatcgcttcgtgaaacctatggtgacatggctgactgctgtgagagacaagaacctgaaagaaatga

SEQ ID NO: 13650 - DNA, 346 bp, Bos taurus
  Clone ID: 58-LIB34-026-Q1-E1-G6
ctcaggtgtgccagtattcaaaaatttggagaaagagctttaaaagcatggtcagtagctcgcctgagccagaaatttcccaaggctgagtttgtagaagttaccaagctagtgacagatctcacaaaagtccacaaggaatgctgccatggtgacctacttgaatgcgcagatgacagggcagatcttgccaagtacatatgtgataatcaagatacaatctccagtaaactgaaggaatgctgtgataagcctttgttggaaaaatcgcactgcattgctgaggtagaaaaagatgccatacctgaaaacctgcccccattaactgctgactttgctgaagata

SEQ ID NO: 13651 - DNA, 379 bp, Bos taurus
  Clone ID: 58-LIB34-027-Q1-E1-G6
gaagtttagttggttttagtctgttttgacttgcccttaatttaatttatggcaaatcataactgtatcgaaggtttagcagtataatagcaaagtcctactccagtggggaaagttgttatgtttgtactaactttcaaaaacattatgcatgcctatcattgcaaagcatctaattgttctcttcacatgataaaggtggtggaggtggatacagcagtcggagaacctctggcagagacaaatatggaccacctgtacgcacagaattcagacttattgtagaaaatctttctagtcgttgcagttggcaagatttaaaggatttcatgagacaagcaggtgaagtaacctatgcagatgctcacaacgaacgcac

SEQ ID NO: 13652 - DNA, 151 bp, Bos taurus
  Clone ID: 58-LIB34-028-Q1-E1-G10
aaatacgccaacccccgaaacagtcaagaagcctcaagacgccaaaagttccatgatccttgacatctgtaccaagtacctgggagaccaggatgccactatgtccagccgggatatagccatgatgacaggcttctcacctgaatttgaa

SEQ ID NO: 13653 - DNA, 369 bp, Bos taurus
  Clone ID: 58-LIB34-031-Q1-E1-G6
aagacgcgtgggggcaatggtaacacatttgactccgataacgagtgtaatgaatacagtagcattcctggtgaaccggatgatgagttgctgcgcttctccaactgaccggtccacaagcctgaaatccacaaggcaacaggaagtgggagggtcagagtctgcgccagacccccgctacaagttccaattaaaaccacattgtagacacctgaaaacccgtctaaagtgtcaccataaattcaatataagaggtcgtcaaataagatcctacaggggtgggaactccataggatctaaccttacatatgcgtggcagcaaagtaacactctctccatcagggcaactaagttcaatgcacggaccgt

SEQ ID NO: 13654 - DNA, 410 bp, Bos taurus
  Clone ID: 58-LIB34-034-Q1-E1-G10
aaaactgacctcatcagccagacatagactcaagtgtgccagtactcaaaaatttggagaaagagctttaagagcatggtcagtagctcgcctgagccagaaatttcccaaggctgagtttgtagaagttaccaagctagtgacagatcgcacagaagtccacaaggaatgctgccatggtgacctacttgaatgcgcagatgacagggcagatcttgccaagtacatatgtgataatcacgatacaagctccagtaaactgaacgaatgctgtgataagcctttgttggaaaaatctcactgcattgctgaggtagaaaaagatgccagacctgaaaacctgcccccattaactgctgactttgctgaagataaggatgtttgcacaaactatcatgaagcaaaagatg

SEQ ID NO: 13655 - DNA, 417 bp, Bos taurus
  Clone ID: 58-LIB34-035-Q1-E1-G6
cagaagcaagcttgtggttttgagtatacctctaaacttcagcggatgtttcaagacattggtgtaagcaaagatttgaacgagcagttcaaaaagcacctaacgaactccgagccacttgacttggatttcagtattcaagtgctgagttccggatcgtggccctttcagcagtcttgcacgtttgccttgccgtcggagctggaacggagttaccagcgattcacagccttttacgccagccgtcacagtggcagaaaattgacgtggttatatcaactgtcaaaaggagaattagtaacaaactgcttcaaaaacagatacactttgcaggcatccacattccagatggccatcctgctccagtataacacagaggacgcctatgccgtgcagcagctgacggacagcacccag

SEQ ID NO: 13656 - DNA, 410 bp, Bos taurus
  Clone ID: 58-LIB34-036-Q1-E1-G10
gggtctaggcacgcgtcccaaaaggcgaacatcaaggcctgtctattggtgatgttgcaaagaaactgggagagatgtggaataacactgctgcggatgataagcagccttatgagaagaaggctgctaagctgaaggaaaagtatgaaaaggatattgccgcataccgagctaaagggaagcctgatgcagcaaaaaagggagttgtcaaggctgaaaagagcaagaaaaagaaggaagaggaggaagatgaggaagatgaagaggatgaggaggaggaagaagatgaagaggatgaggaggaggaagaagatgatgatgatgaataagttggttctagcgcagtttttttttttttttttttcttgtctataaagcatttaacccccctgtacacaactcactccttt

SEQ ID NO: 13657 - DNA, 380 bp, Bos taurus
  Clone ID: 58-LIB34-036-Q1-E1-G6
agacgagtacatcatggtgatcgagaacatcatcaaatcgggctcggacgaggtgcaggttaaacaggagcgcaagttcatcaaccacatcaagtgcagggaagcccttaaactgaaggatggggcacactatcacctgtggggcgtgtcctctgacctgtggggcgagaaacccaagatcatctatatcatcaggaaagacacctgggtggagctgtggcccgatgctgaagaatgtcaacatgcggagaaccagaaacagtgcgaagacctggccaaattcacagagaatatggtcgtctttggctgtcccaattgatcgcatacacatgcacccctctcatacacaatgtccacgcaataaagcttcacttctgttc

SEQ ID NO: 13658 - DNA, 414 bp, Bos taurus
  Clone ID: 58-LIB34-037-Q1-E1-G10
agccgggttgagaggagcgtggccttctcctctccccgccatggcgtgtgctcgtccactgatatcagtgtactccgaaaagggggagtcctctggcaaaaatgtcactttgcctgctgtgttcaaggctcccattcgacccgatattgttaactttgttcacaccaacttgcgcaaaaacaacagacagccctatgctgtcagtgaattagcaggtcatcaaaccagtgctgagtcttggggtaccggcagagctgtggctcgaattcccagggttcgaggtggcgggactcaccgttccggtcagggcgcttttggaaacatgtgtcgtgggggccgcatgtttgcgccaactaagacctggcgacgttggcaccgcagagtgaatacgacgcagaagcgatacgccatctg

SEQ ID NO: 13659 - DNA, 421 bp, Bos taurus
  Clone ID: 58-LIB34-037-Q1-E1-G6
caagttctagatcgcgagcggccgccctttttttttttttttttaataagcaaaataggaaaccattttaataaccaaaaaacagaaaccagtctgaataaaactacaatagactaggttttaatattttcatatcataagcagggtttgaaattgatcccttattgtacatgaaataaaaacaatttctgttgtggcaaatttgatttcaacacagttgaatctgtaaaaaccgaagctcgtttccaatgcaggacaaatatccacaatatttaaaactgcaagcaccatgcggttcatacaatcttgttattactgttaatttatcaactaatacaaactcaaaaatgcatccggccagcagcgccagcaatttcaaatgagaactaaaaaatacgcttccattttggtatttttgtca

SEQ ID NO: 13660 - DNA, 378 bp, Bos taurus
  Clone ID: 58-LIB34-038-Q1-E1-G6
agcggcggggcaatagagtgtgaaacagcagagaacactgaagagtgcatcgccaagatcatgaaaggagaagctgatgccatgagcttggacggaggctacctctacatagcaggcaaatgtggcctggtgcctgtcctggcagagaactacaaaactgagggtgaaagttgcaagaacacaccagaaaaagggtatcttgctgtagctgtggttaaaacatcagatgctaatatcaactggaacaatctgaaagacaagaagtcctgccacactgcagtagacagaaccgctggctggaacatccccatgggtttgctctacagcaagattaataactgtaaatttgatgaatttttcagcgcacgttgtgcacct

SEQ ID NO: 13661 - DNA, 346 bp, Bos taurus
  Clone ID: 58-LIB34-039-Q1-E1-G6
aatcttgtgccccaaagatgactgcccttgcttctgtgtagagattaataattgattagtgcatagctcggaattttagtaaaagggaatcggttactttgggctgccatttgtttaaactgggtaacctgcaggagaatgaggtgatacaggacgtggtggcacaaagatgaagaggatcctggttttcctccttgctgtaccctttgtgcatgctctagatacacgccgagattattagaaagatacagtctgcacggacattgccagactgagaagagatgacttcacatctttatcactggtcctatactgcagataatttcccaatagcacctttgaacag

SEQ ID NO: 13662 - DNA, 408 bp, Bos taurus
  Clone ID: 58-LIB34-040-Q1-E1-G6
caggcgtcagcaactcgtcaggaatccctctccacagcagacatctgttccatgatggacctctgcctggacctgagtttggtgggtgcaattacaacataagatggtaatgatcctcccagtggtgacattctcactgaccgaggaggggtgcattgcccaagacttgcggaactacagcaatctgcctgctgagacacaggctggcccttctgctctgataaacactgcaatacaaaatgcccttctggctgcaggatgaaaaggttgattgatcaagtcgatcaacattttacaagcagaatccatagattatgagattcaccacttagatagcagaagaccagtgaggactccaatacattgaccaacaacatactggaactaatgagaggggattatgccaaa

SEQ ID NO: 13663 - DNA, 401 bp, Bos taurus
  Clone ID: 58-LIB34-042-Q1-E1-G6
acggacgcgtgggctgggaatatgtgttccagcagcagcccagtcaagaggattgtgaaggcagctccctgccggccgcatttaaacactttgccctgatgcagcgggacagctgggtggacatcttccgacttctcttctggggcggttcctatggtggtgctggacagccccagctcatcagccgcaactggtttggtctgccgggacgactggatgcggccatggccggccacatctatgtctcaggctcagctcccagcttcccccgggccaagatgactaagtctgcacgccgccatcgcaaacgctaccgctcgctccgaagccgtggtcgaggccgcggccgaagacagaacccctaacggcgatctcgatctgccttcctgtcctggctctcc

SEQ ID NO: 13664 - DNA, 334 bp, Bos taurus
  Clone ID: 58-LIB34-043-Q1-E1-G6
ttcgccggtcgacccatgcaaccactgaaaaccgtcatggcgaattttgtggcttttgtagacaagtgctgtgcacctgatgacaaagaatcctgctttgctgtggagggtccaaaacttgttgtttcagctcacatagccttagcctaaacacgacacaaccacacgcatctcaacttaccctgagagtaacatgaaaaaagtgaaatgaaaactcagagcttattcaactgttttccttttccgttggtgttaaaccaacacacgcactaaagaacgtcaatttctttaaatattttgcttcttttgtttgtgctacaattactacaaactg

SEQ ID NO: 13665 - DNA, 193 bp, Bos taurus
  Clone ID: 58-LIB34-044-Q1-E1-G10
gacgcgctgttcaacgcaacaccctatagtgagtcgtattcagtcgcagaaagaagcactttctggtcgcaaataacgccgttagtcaatcgcaagccacgacattaagggtctgtgggttgccatgctggccgcgcttcggccacgatcccatccgggatataatggatagctgtggggccgaggaacccct

SEQ ID NO: 13666 - DNA, 428 bp, Bos taurus
  unsure (360): unsure at all n locations; Clone ID: 58-LIB34-045-Q1-E1-G6
gcaggatcagacgattctctcatacgaaaagcaaattcctgcacgcacgctctgaccttgaagtagcgcattacaagctgaaaaccagaaacctcatgctgcatcacgaattccttcagcgagtcaagcagctgcccttggaatacagctatggggagtacagagatctcttccgtgattttggaacccactacatcacagaggctgtgcttgggggcatttatgaatacacactcatcatgaacaaagaggcgatgggacagaggagattactctcttaagaacatccacgactgtgctaaacatgattttaaaatcggcgccgccataacatcggtctacttgaagctgggtgtgtcngaggccaagtgcagtgacattctcaatgagataaaagacagaaacaagaaagacagcatggtgaaaga

SEQ ID NO: 13667 - DNA, 269 bp, Bos taurus
  Clone ID: 58-LIB34-046-Q1-E1-G10
attctagatcgcgagcggccgcccttttttttttttttttaagatagaaagattttctttattaatgaccccaaccgtatttctttagatacaggagttttgaactcagatacttagagaaaacaagttaagattgcattatcctgcaactcattaccagtagcatattgcaaagcaaaacagcttggaaaagaaggggcaggaaaggggagtgagggagggaatataaagaaagggatttaagttgatcaagtggaactcttttttct

SEQ ID NO: 13668 - DNA, 392 bp, Bos taurus
  Clone ID: 58-LIB34-046-Q1-E1-G6
gttctagatcgcgagcggccgccctttttttttttttttttttttttttttctgtcttcattttagtaatttgttttcgattgtgccggccgttggtattagcactaggatgaggagaaagtataggacagatgctagttgtccgatggtgatatatgggtgttcgactggttgtcctccaattcatgtgagtgtcagtaggtctgctactagggctcagaataggcattggctgagtggtcggaatattatgcttcgttgtttggaggtgtgtagtagggggattagagcaggaattaggatatagaaagctagggctaatactcctcctagttttgttggggattgatcgtaagattgcgtatgcaagtaagaagtatcactccggtttg

SEQ ID NO: 13669 - DNA, 436 bp, Bos taurus
  Clone ID: 58-LIB34-047-Q1-E1-G6
ctgaacccaacaaatgtcaagcgacctttagatcgaagattcgtacgtatatgaatatttaatagcaccatctgttgggtcctaatctacctgacctcccaaattagtgctgccaagtagcagaagagtctccccaccccagtattctccctagaagtcttagcatagagttgtacataatttcccctaccttcatgtatctgaacataggtttaaacatacccttttcttctaccttaaagtctttcctgctccaaaccaattttctctattttacttttatttggtcttcagtattacaggtcgtaatctcattcttttttctagcctatatataaggcagatctgataccatatcaggacagtcctgaaggtcaagaccacacttctgcttcatctgggggccccaaacctcccaaggctcgaacttacgctg

SEQ ID NO: 13670 - DNA, 437 bp, Bos taurus
  Clone ID: 58-LIB34-048-Q1-E1-G6
gtctccaccctactgggccaggcgagttccaagatgctggagcagaactctgagggttgggtccagactggttccactccttggagaagaaaaaaatcccagtctgcttactcagaggagcaacagacaatggatcccaaaggccagaaggtgaagcttaatgatggccacttcattcctgtcctgggatttggaacctatgcacctcaagaggttgctaagagggatgctctggaattcaccccatttgctatagaggttgggttccgccatattgactgtgctcatgcttaccaaaatgaagagcagataggtcaggccattcgaagcaagatggcagatggcactgtgaagagagaagacatattctgcacttcaaagctttggtgcacatcctttcgaccagagttggtccgaccagccttgggaaagtcacg

SEQ ID NO: 13671 - DNA, 431 bp, Bos taurus
  unsure (354): unsure at all n locations; Clone ID: 58-LIB34-050-Q1-E1-G6
gatgctgctcctgccctgagcttaggccggtataaggccaccttgccagaccaagggaacctggatgaaaaagagagaggccaccatgtcctctcagaacccagagcgaaaacagagcctggtgggctgggactcccatctttctagaatcttccttgctgctatttgtagtctcagcccaggggctcaccccaaatcctgaagcctgtctggtgttctcctcggtcaatggcagctccatctcctgccagccacctgcccaaatcccccacagcctcccagctgacaccatctttctggctgtggagttcttcaacctgactcagctgcctgccgacttcctccagggcgtcnctaacctccaggaactccacctttccagcaaccgactggaggacttctcccccaagttcctgctgcccgttccccag

SEQ ID NO: 13672 - DNA, 226 bp, Bos taurus
  Clone ID: 58-LIB34-051-Q1-E1-G6
ctgagagtgaaggacattctccaagtcaccttgcagtgttgtgtcgaggccgagtttttgtctttgatgtaatgcatgagggatatctgatgactgcaccagagattcagaggcaattgacatacatccaaaagaaatgccacagtgaacccgacggacctggggtagcagcgttaactactgaggagcgaactcgatgggctaaggcacgagaatatttgattag

SEQ ID NO: 13673 - DNA, 241 bp, Bos taurus
  Clone ID: 58-LIB34-052-Q1-E1-G10
ggccgcacgagggttttactgtctcttacttccaatcagtgaaattgaccttcccgtgaagaggcgggaatgcacaaataagacgagaagaccctatggagctttaactaaccaacccaaagagaatagatttaaccattaaggaataacaacaatctccatgagttggtagtttcggttggggtgacctcggagaataaaaaatcctccgagcgattttaaagactagacccacaagtca

SEQ ID NO: 13674 - DNA, 236 bp, Bos taurus
  Clone ID: 58-LIB34-052-Q1-E1-G6
gcttaatgatggccacttcattcctgtcctgggatttggcactgctgaagctaaagaggttcctaagagtgaagctctggaagtcaccaaatttgctatagaggttgggttccgccatattgactgtgctcatgtgtaccaaaatgaagagcacgttggccaggccattcgaagcaagattgcagatggcactgtgaagagagaagacatattctacacttcaaagctttggtgca

SEQ ID NO: 13675 - DNA, 237 bp, Bos taurus
  Clone ID: 58-LIB34-054-Q1-E1-G6
tggaaaagcaccagttatatatagatgagactgtgaagaataatatcccaactaagcttcgtgtgctccgttcaattctggagaatttgagaagcaaaatacaaaaattagaatcggatgtctcaactcagatggaatactgccgcaccccgtgtactgttacttgcaatattcctgtggtgtctggcaaagaatgtgaggaaatcatcaggaatggaggtgaaacatctgaaatgt

SEQ ID NO: 13676 - DNA, 345 bp, Bos taurus
  Clone ID: 58-LIB34-055-Q1-E1-G6
caagatggcggcgacggtggcgttttctggcgtcctacgccgggcgggctggaggctccttcagctgcggtgcctgcccgtgcgccgctgccgaccagccctggccccacgtgccttccgtgcttcagctatgcagctaaggtctatggatcagcagaagaatcaacccccgccctcttcttcgcagcaacagtctgacgcgcacggcgcacaggaaaccaatccagaggctctgcattcacccccgaggtacaccgaccagcgcagtgacgaggaggaagactaggagagtgaggagcacctgcagcaccgcatcgtgacagcagccctggagtttgtgcccac

SEQ ID NO: 13677 - DNA, 162 bp, Bos taurus
  Clone ID: 58-LIB34-056-Q1-E1-G6
cgcaccggcagcattccaagttgctgactcttccagcatagccgggcctaagcttttgcaaccatgtccagtggacctgcagttcgcattgattctggcagtacccagtcctgtttgggtgtcttcgagcaccgaaatgtggaaataattgccaatgatcac

SEQ ID NO: 13678 - DNA, 219 bp, Bos taurus
  Clone ID: 58-LIB34-057-Q1-E1-G6
ggtactgattgccttttctcagtatctccagcagtgtccatttgatgagcatgtaaaattagtgaacgaactaactgagtttgcaaaaacatgtgttgctgatgagtcccatgccggctgtgaaaagtcacttcacactctctttggagatgaattgtgtaaagttgcatcccttcgtgaaacctatggtgacatggctgactgctgtgagaaacaaga

SEQ ID NO: 13679 - DNA, 202 bp, Bos taurus
  Clone ID: 58-LIB34-058-Q1-E1-G6
caagaccctagagtgagtcgtactaaccctcagcggtagcatcgggtcgggccgcagtggtttcgggtcgttcgcgggcagggcggtgcgtccccttcgacaacagtcagcgcgagaacctgtggcagccgtgcgcgaagactgagagggagtgccagcgcccgttcgcgttcaggtacattgtgtcgcgcactgacaagtc

SEQ ID NO: 13680 - DNA, 202 bp, Bos taurus
  Clone ID: 58-LIB34-059-Q1-E1-G6
ctgtggcctcagcttcactatgccaactgggagaacacccagctcactcttaacctgttcccacttctgggaaccacctcccttccatccctcctgtttcaatggaaatggactgatttggtgattgaagttcccaagagctacccaaacacgagaaaccaaggttccttgggccattggcaagaatggacggggacaccca

SEQ ID NO: 13681 - DNA, 91 bp, Bos taurus
  Clone ID: 58-LIB34-062-Q1-E1-G6
aaggtcaatagcctgacagtagggccccgagggccgcttctcgtccaggatgtggttttcactgatgacatggctcactttgaccgggaga

SEQ ID NO: 13682 - DNA, 277 bp, Bos taurus
  Clone ID: 58-LIB34-063-Q1-E1-G10
gtgatgagtttaaggcagatgaaaagaagttttggggaaaatacctatacgaaattgctagaagacatccctacttttatgcaccagaactcctttactatgctaataaatataatggagtttttcaagaatgctgccaagctgaagataaaggtgcctgcctgctaccaaagattgaaactatgagagaaaaagtactgacttcatctgccagacagagactcaggtgtgccagtattcaaaaatttggggaaagagctttaaaagcatgggcagt

SEQ ID NO: 13683 - DNA, 244 bp, Bos taurus
  Clone ID: 58-LIB34-064-Q1-E1-G6
ctcagaatttaatcaaacaaaactgtgaccaattcgaaaaacttggagagtatggattccaaaatgcgctcatagttcgttacaccaggaaagtaccccaagtgtcaactccaactctcgtggaggtttcaagaagcctaggaaaagtgggtactaggtgttgtacaaagccggaatcagaaagaatgccctgtactgaagactatctgagcttgatcctgaaccggttgtgcgtgctgcatga

SEQ ID NO: 13684 - DNA, 199 bp, Bos taurus
  Clone ID: 58-LIB34-065-Q1-E1-G10
gggggttgtaaattggcatggaaatttaaagcaggttcttgttggtgcacagcacaaattagttatatatggggatggtagttttttcatcttcagttgtctctgatgcagcttatacgaataattgttgttctgttaactgaataccactctgtaattgcaaaaaaaaagaaaaagaaaaaaagttgcagctgttttg

SEQ ID NO: 13685 - DNA, 213 bp, Bos taurus
  Clone ID: 58-LIB34-065-Q1-E1-G6
gcaaagttctgcatcgccactcagacatcatggcggacaaccgggatccagccagcgaccagatgaaacactggaaggagcagagggccgcgcagaaacctgatgtcctgaccactggaggtggtaatccagtaggagacaaactcaatagtctgacggtagggccccgagggccccttctcgtccaggatgtggttttcactgatgaaatgg

SEQ ID NO: 13686 - DNA, 258 bp, Bos taurus
  Clone ID: 58-LIB34-066-Q1-E1-G6
gcctagtgtgagtttgcacctgcagtggggcgtgtcaggatccaacgcgcgacaacgtagcgagataaagttgcgtctcgattgctgaggcgaccacttagcatgttccacggcgatggaagcttctttgaggtgtatggatcaaaagacgtaggtgctacttgacattatgcaagatccccagactgtccatgaaatctacaactacttgagaaaagatcagcacgaaatcctgacggggatgccctgcaatatgga

SEQ ID NO: 13687 - DNA, 207 bp, Bos taurus
  Clone ID: 58-LIB34-068-Q1-E1-G6
cgcgcaaggtgagggactggggtggagtggcctcggttggctcccgcgtgtataggccgggacggacggtctggcggcagaataataaggctgtctgcaaagatttgaaaaatggcaacaaatgaaagtatcagcgtctttagttcagcatccttggctgtggaatatgtagattcacttttgcctgacaatcctctgcaggaacca

SEQ ID NO: 13688 - DNA, 233 bp, Bos taurus
  unsure (188),(223)...(224): unsure at all n locations; Clone ID: 58-LIB34-069-Q1-E1-G10
cggacgcgtgggcgcggtttctggaggcgaagaacgcggttggccaatcgcaagccagaagatgaaggttctgtgggttgccgtggtggtcgcgcttctggcaggatgccaggcggatatggagggagagctggggcccgaggagcccctgactacccagcagccccgggggaaggacagccagcctntgggagcaggcgctgggccgcttctgggagttacnnctgcgctgg

SEQ ID NO: 13689 - DNA, 213 bp, Bos taurus
  Clone ID: 58-LIB34-069-Q1-E1-G6
gacttccattcccaccatcttatgtacctgttatgttttcagaattaagtgatcgcatgacattcttagagaggataaaaaatatgttatatgcactttactttgaccttttctttatgacatacaaagagaagaagtggaatcagttttacagtgaagtactaggaagacctactaccttatcagagacgatggggaaagccgaaatgtggc

SEQ ID NO: 13690 - DNA, 376 bp, Bos taurus
  Clone ID: 58-LIB34-071-Q1-E1-G6
acagattacaaggtggtttattgagttagtggcatgcgagcaagttcttcccgtgatcagcaaacgcaggcattagtgcgtttcagaggagttcagaggaaggagaggctggaggggtcaggaggacctcgaggtcagggcctggtcatctggcgacgtgcagagctctctaaaggggcctgaagctcatctcaggggcaagtgggtgcagacgccccgatacttgcaaaagcaactttcacgcctcactcctcctggctcttccggcggtattgctgcagtgctttctctgccacattctccatgaagttaggactggagacttcctgcgggaccgtcactgtgatggggaaggagttgaagagtttcacaatca

SEQ ID NO: 13691 - DNA, 431 bp, Bos taurus
  Clone ID: 58-LIB34-074-Q1-E1-G6
cccgggccgacccacacgtcaactggacctcgcctaagctgtgtctctgactcatttctgactttaggcaagttcttccaatgggaaaaatggcgaagatgtttagtttcatccttgtcaccactgctctggtaatgggcaggggaagctcggctctggagaactgcctccaggagcaggcgcggctcagagcccaagtgtacctgctggagacccgggtcaagcagcaacaagtcaagatctcgcagcttttgcatgagaaacaagtccagctccttgataaaggagaggagaatagtgtcattgaccttggaggaaagaggcaatacgcagattgttcagagattttcaatgacgggtacaagcagagtggattttataaaatcaaacctctccagagcccagcagaattctctgtttaatgtgacatg

SEQ ID NO: 13692 - DNA, 317 bp, Bos taurus
  Clone ID: 58-LIB34-075-Q1-E1-G6
tgccatcctggtaactgatgcgggatttcaccccttcaggcatcgctggagcatttcaaagaggttactatcggtattacaacaagtacgtgaacgtgaagaaagggagcatcgcggggctctcgatggtgctggcgggctacgtgtttttaaactaatgccgctcttaaaaggggctcaaacaagaacgggtccgcaagtaccactgaagaaggcgcaatccggattcctgaacaacaacttttgcgggacccctggaaccctttacatcccaaaggggaatttacatcaataaaaaatgactggtacttggactg

SEQ ID NO: 13693 - DNA, 401 bp, Bos taurus
  Clone ID: 58-LIB34-076-Q1-E1-G10
aacgcagcttttgaaatgacattagctgagggcgttaaattggagaagaagctcttctactcaacttttgccaccgaagaccggaaggaaggcatggccgcgtttgtggagaagagaaaggccaacttcaaagaccagtgacagccagcggcctctgcctcagccacccttccgggaggacgagcagcttcagaagctgacgaatccttctgtcttgtgtgcagtgtcggcgacacacggcttctctccagctctgcggggtggtgtgggctcacagcctgccggggacgggtggccttcacccagggctcacgggaccccggcttggtcactgtgccgtttgcagcggtgggcgtagccgctcagagtgaaggccttgttgctgggtctctaaagagaca

SEQ ID NO: 13694 - DNA, 291 bp, Bos taurus
  Clone ID: 58-LIB34-076-Q1-E1-G6
gcaacctttttttttttttttttttttttttttttttttttttttttttttttatgtatgtggggggatgcacagttttcaacttataatcttgcagtaatttaaatttgtagcagggctaattataattttcctttttccataagttagcttaaccacatttacctacctagtttttcagaagctaatgttagttacaaatactcagtaaaatgtggggtaaaatcatgtttttgggataatactcaacagctaaattaatatagatcctcctcaaaacatattgtcaaa

SEQ ID NO: 13695 - DNA, 133 bp, Bos taurus
  Clone ID: 58-LIB34-078-Q1-E1-G6
acggaaggagcatggttttgggagtttattttcagactgtggggaaggaaacaggccccattttgtatatagttgcaacttaaactttttggcttgcaaaatatttttgtaataaagatttctgggtaacaac

SEQ ID NO: 13696 - DNA, 394 bp, Bos taurus
  unsure (17): unsure at all n locations; Clone ID: 58-LIB34-079-Q1-E1-G10
gacccaagcgtcagcangaatggaggtgaaacacctgaatgttactcaattcaccttgaggatccaacaaaccaatttaaatttaatgttatatgaaaaccggaaaaaggagatgggcaattattcaaaaccgtcaagattgtaatgttgactttggcaagaaatgggattcatatgaacaaggatttgggaatattgcaacaccaatgcataagggaagaaatacgtgtggtgtaacatgtgagtattggctcggaaatgacagatttacccagcttaccaatatgggacccacaaagcttttgattgaaatggaggactggaaaggcgataaggtgacggcactctatgaaggatttactgtacagaatgaggccaacaaatatcaactgtc

SEQ ID NO: 13697 - DNA, 395 bp, Bos taurus
  Clone ID: 58-LIB34-079-Q1-E1-G6
ggcagagcaactggacctcgcctaagctgtgtctctgactcatttctgactttaggcaagttcttccaatgggaaaaatggcgaagatgtttagtttcatccttgtcaccactgctctggtaatgggcaggggaagctcggctctggagaactgcctccaggagcaggcgcggctcagagcccaagtgtacctgctggagacccgggtcaagcagcaacaagtcaagatctcgcagcttttgcatgagaaacaagtccagctccttgataaaggagaggagaatagtgtcattgaccttggaggaaagaggcaatacgcagattgttcagagattttcaatgacgggtacaagcagagtggattttataaaatcaaacctctccagagcccagca

SEQ ID NO: 13698 - DNA, 397 bp, Bos taurus
  unsure (282): unsure at all n locations; Clone ID: 58-LIB34-080-Q1-E1-G6
agggcgcaatgctgaaggtgggactgcctttgggtgcctgtgcgcggtcgtggaagtcggtccggatggctagctgcgggatggcgcgccggaacccgctggataataaagtggccctagtaacggcctccactgatgggatcggttttgccatcgcccggcgtctggcccaggacggggcccacgtggtggtcagcagccggaagcagcagaatgtagaccgggcagtggcaacgctgaaagcggaggggctgagcgtcacgggcaccgtgtgccacgtanggaaggctgaggaccgggagcggctggtggccacggctgtgaagcttcatggcggcgtggacatcctgatctccaatgctgccgtcagccctttctttggaagcttgatggatgt

SEQ ID NO: 13699 - DNA, 428 bp, Bos taurus
  Clone ID: 58-LIB34-082-Q1-E1-G10
agcatacgagctactcacaaacagtttaccaagaactaactcatctatgtggcaaaatactgagaagatttgtaagtagaggtgacatgcctaacgagcctggtgatagctggttgtccagaaaatgaatctaagttcagctttaaagataccaagaattcaaataaaccccactgtagctttaaaagttagtctaaaaaggtacagccttttagaaacggatacaaccttgactagagagtaaaatttaacactaccatagtaggcctaaaagcagccatcaattaagaaagcgttaaagctcaacaacaaacattaaatagattccaacaacaaatgattaactcctagccccaatactggactaatctattatagaatagaagcaataatgttaatatgagtaacaggaaagattttctccttgc

SEQ ID NO: 13700 - DNA, 440 bp, Bos taurus
  Clone ID: 58-LIB34-082-Q1-E1-G6
tgccaatccatgcagaatccttctaccagtcttcttgagcggaagcacatgatgttagaagcttttgcaaaacataataaaatgatgaaagattgttcaactggaaaaggatttgaccgtcatctcttaggcctctcactcatagcaaaggaggaaggcctccctgttccagaactcttcacagaccccctcttctccaggagtggaggaggtggaaactttgttctctcaaccagtctggttggttatttaagagtccagggcgtgatggttcccatggtgcacaatggctatggattcttctatcatatcagagatgacaggtttgttgtgtcctgttcagcctggaaatcatgtccagagactgatgcagagaagctagttcagcaagtttttcatgctttctgtgatatgatgcaactgatggaaatgcctcatct

SEQ ID NO: 13701 - DNA, 410 bp, Bos taurus
  unsure (370): unsure at all n locations; Clone ID: 58-LIB34-083-Q1-E1-G10
cggctcgacacacgcgtcagaaaataattacatatgttaccatgaggaggcatagcaagtgaacagtatcatttgaaaaatcagtattgtgggtatagctgaggaatgctcataatggtagatcaagggaacatgccatgtgtaccacgattttaacctcgtgctccaaatactggatgttgctctaagggacaagttgtgtctttctagccagcagatctgtaatttgtatagcctcaacagcagttttttaaagatagaggatagattattgaggggactgggctatgtccttttgccttaatttgtgcatattcattaaagtaaaattcattgtgcttaatgatatcaagactaaacggcataacanagaagtactaatatgaagatgattcctcgtatcaggaatg

SEQ ID NO: 13702 - DNA, 360 bp, Bos taurus
  Clone ID: 58-LIB34-083-Q1-E1-G6
agcaaacaatgcccaggagtcttctctgcagtctgccccatcagcaggtgcagcttggagctcccccgagaggccgggaagcccaggcttggccagaccaggggtagccggactcaccactgctgctgccttcaagcctctggggtccagtgggatcaagtcaccaagctggcaacggcccagccaagcagcaccttccactggaagagtcgtaagcagtgggccatccacaggagccatggcaccagccaactcagccagagggcagcctcagcccagtgacgaggacactttggtgcaaagggccgagcatattcccgcagggaaaagaactccgatgtgtgcccactgcaaccaggt

SEQ ID NO: 13703 - DNA, 408 bp, Bos taurus
  Clone ID: 58-LIB34-085-Q1-E1-G10
ccgggccgacccaagcgtcagtttccaatcccctcatgggaaggacctgctgtttaaggactctgctgatgggtttttaaagattccttctaagatggattttgagctgtacttgggatatgaatatgtcactgctcttcagaatctaagagaaagtaaacccccggactcctcaaaggatgagtgcatggtgaagtggtgtgcaattggtcaccaggagaggacaaagtgtgatcggtggagtgggttcagcggcggggcaatagagtgtgaaacagcagagaacactgaagagtgcatcgccaagatcatgaaaggagaagctgatgccatgagcttggacggaggctacctctacatagcaggcaaatgtggcctggtgcctgtcctggcagagaactacaaaac

SEQ ID NO: 13704 - DNA, 430 bp, Bos taurus
  Clone ID: 58-LIB34-086-Q1-E1-G6
agcagctggacaaattcaggaaagatgccgatgctttttacgcctctgaggttttatccactaacttcaaggattctgaagctgccgtaaagcttatcaatgaatatgtgaagaataaaactcatggaaaaattgagaagctcttcaatgatcttgacgtgctcacaaatttaatcttgttgaattatatcttctttaaagcccagtggaagacgccatttaatcctaagcatacgtacgaatcagagttccacgtgagccagaacgatagggtgattgtacccatgatgaccctttacctggaaaccccttacttccgggacgatgagctgggctgcacgctgagtggagctcacgtacaccagcaacgacagcgccctcttcatcctccccgatgatggcaaaatgcaggacctggaaatcaagctga

SEQ ID NO: 13705 - DNA, 444 bp, Bos taurus
  Clone ID: 59-BOVMS1-001-Q1-E1-G4
cgggccgagccacgcgtccgtttctactcaataaggaaactgggtgaaggtggagattttaaataataatggcctgattctttgttgaagtgctttatacttaaacaaaaaccttaccgccaaatataccaaaatacacttctttcattaagtgaattactagcgtttctatgcctggaatgttatgtatgttttatttactagatgtttacattttgggaaggaaaacagtgttgtttgttaaaaaattgaatatttgtaatttgctgttcccaactaagatctttataccataacaaaatttgttcttttctcatgaatttataatttctaaatgaagacaggcaagtataaaattgggggaaaaatgggctttgttaatcaaatgatgtcttgatttttctaaatgaggagattgttttattttcaagactaagcatggga

SEQ ID NO: 13706 - DNA, 373 bp, Bos taurus
  Clone ID: 59-BOVMS1-002-Q1-E1-G4
aagaacagcgagggcgattccatattgaaaacacagatgacctgacgactctgatcatcatggacgtacggaaacaagatggtggactgtataccctgagtttagggaatgaatttggatctgactctgctactgtgaatataaatattcgatccatttaagagggcctgtgctctcacactcagactcattcttaacctttcccaaatgattcacatggactaatctttctatcgttctgatctgtaaatacttaaaaaaaagagtagttttgtatcaacctaaatgagtcgaagttcaaaaataatacatttcagtcttttcataattgttgacctaagaagattacacattttctagtgacatgtacata

SEQ ID NO: 13707 - DNA, 233 bp, Bos taurus
  Clone ID: 59-BOVMS1-003-Q1-E1-G12
tttctgccctggttggacactgtttcccacagtaatgaccaggggacttatgaatttgttgttaaaggtcttctctgacgtcaacactgaacggactcgaaacgtcattcgtgcgactgttcgatctgttctagtcacactaagtgtaccgtttcaatgcatgcatttgcccacacttgtctcaggtcaagaagccttcaatgggtggatcaaataacaatcctttgtcaaac

SEQ ID NO: 13708 - DNA, 300 bp, Bos taurus
  Clone ID: 59-BOVMS1-004-Q1-E1-G4
atgcgacgtcatagctcttctatagtgtcacctaaattcaattcactggccgtcgttttacaacgtcgagactgggaaaaccctgacgttacacaacttaatcgccttgcagcacatccccctttcgccagctggcgtaatagcgaacaggcccgcaccgatcgcccttctcaacagttgcgcaacctgaatggcgaatgggacgcgccctgtagcggcgcattaagcgcggtgggtgtggtggctatgcgcagcgtgaccgctacacttgccagcgccctaacgcacgctcgtttcgct

SEQ ID NO: 13709 - DNA, 406 bp, Bos taurus
  Clone ID: 59-BOVMS1-005-Q1-E1-G12
atgcgacgtcatagctcttctatagtgtcacctaaattcaattcactggccgtcgttttacaacgtcgtgactgggaaaaccctggcgttacccaacttaatcgccttgcagcacatccccctttcgccagctggcgtaatagcgaagaggcccgcaccgatcgcccttcccaacagttgcgcagcctgaatggcgaatgggacgcgccctgtagcggggcattaagcgccggggggtgtggttggtacccccaaccttaacgctaaactttccaacggcctaacgcccgctcctttcgccttcctcccctcctttcccgccaagttcgccgggtttccccgtcaagctctaaatccggggctccctttatggttcccaattaatgccttacggcaactcgaaccc

SEQ ID NO: 13710 - DNA, 361 bp, Bos taurus; identical to SEQ ID NO: 12058
  Clone ID: 59-BOVMS1-005-Q1-E1-G4

SEQ ID NO: 13711 - DNA, 318 bp, Bos taurus
  Clone ID: 59-BOVMS1-006-Q1-E1-G4
atgcgacgtcatagctcttcaatagtgtcacctaaattcaattcactggccgtcgttttacaacgtcgtgactgggaaaaccctggcgttacccaacttaaccgccttgcaacacatccccctttcccaatttgggttaaaaccaaaaaggccccaaccatttgcctttccaaaaatttgcccacccgaaatggcaattggaaccccccttttaccggcccattaaccccgggggttttggggttaacccccagcttaacccctaaatttccaaagccccaacccccggtcctttctcctttttccccttccttttcc

SEQ ID NO: 13712 - DNA, 388 bp, Bos taurus
  unsure (106),(163),(223): unsure at all n locations; Clone ID: 59-BOVMS1-007-Q1-E1-G12
cccgtccgcaaaatttataggtcacataactccagctatgtcagcctctcacttaaaacgcctattcttgtgagggtctctagcataaaggccctgcctgcgatanggctgacctggctcttcacagccggcctgactcaagtgaggagtttccaagtggtcncgctgccgttcaaggtcagaccttgagtatgtttgtacttagtcttcactcctgacctgngactggcaactgatctggaattgagaatttcttcctccttctcaagcctagccccaaatggcatggcagagaacccaaacatccaatttggataccaaagttttctcaccttgatttcgcagctctcaacagaagcattcctgaatcatggacataaaatgttat

SEQ ID NO: 13713 - DNA, 442 bp, Bos taurus
  Clone ID: 59-BOVMS1-007-Q1-E1-G4
cttaagtaccaatcagatggtaccatcttataaagcctcttcttgtaacagtgaaaacttgtgggtaggacagtggatgaagtttattgctcaactactcctccagcttgtccaatttaatgactaaaggaatagagagaaaaaatgatggttttctcaatttcatagaaaagaatggtttatccattcattctttacattcaatgactgttgagcatttactctttctaaggctctgtgttagcactgggccatataaggaaaatatcagagataaattctgttcccagtgctatcctgacacagtatgtggccttggaaaatttgctaaacattctgtgcttatttttcccatgtgtaaaataaggatttctggacaaacaaccttatacctcacagatgtaccgtggagactgagaaaatatcttaatatggacatgac

SEQ ID NO: 13714 - DNA, 366 bp, Bos taurus; identical to SEQ ID NO: 1154
  Clone ID: 59-BOVMS1-008-Q1-E1-G4

SEQ ID NO: 13715 - DNA, 386 bp, Bos taurus; identical to SEQ ID NO: 3516
  unsure (370): unsure at all n locations; Clone ID: 59-BOVMS1-009-Q1-E1-G12

SEQ ID NO: 13716 - DNA, 254 bp, Bos taurus
  Clone ID: 59-BOVMS1-010-Q1-E1-G4
attaaggacaattggaaaccggtcaaaaaccaattggttgacattgctaatgaggtgatcaaactgaaaggctacacatcctgggccattggactgtcagtggccgatttggcagaaagtataatgaagaatcttaagcgggtgcatccgatttccaccatgattaagggtctctatggaataaaagaggatgtcttccttagtgttccttgcatcttgggacagaatggaatctcaaacgttgtgaaagtgac

SEQ ID NO: 13717 - DNA, 329 bp, Bos taurus
  Clone ID: 59-BOVMS1-011-Q1-E1-G12
ggaaagtgccagtatgatgtaaaaaatcgagctgccacgtgttcaaggtatattgaacttcccttcggcagcgaagaggccttaaaagaagccgtggccaataaaggacctgtgtctgttggtatagacgcgagccattcttctttcttcctctacaaaactggtgtctactatgacccctcctgcactcagaatgtgaaccatggtgtactcgtggttggctatggtaaccttgacgggaaggactactggcttgtgaaaaacagctggggcctgcactttggtgaccaaggatatatacggatggcaagaaatagtggaaatcactg

SEQ ID NO: 13718 - DNA, 251 bp, Bos taurus
  Clone ID: 59-BOVMS1-013-Q1-E1-G12
aacttctcttgggcaaagcaagcccttcgaaatactacaatatcatgactgtatcatgttaagagacaatctatggatgggtcatcttataatggatgggtatgtattgattctgcctagggtgagcaccccgtgcggatgggttaagggctttaatccaggtcaaaactgtgataatctggcataggatgaaatgggaccaaaattttgtgaagtgccagtgccatagtttggacagtcaccttcaatga

SEQ ID NO: 13719 - DNA, 348 bp, Bos taurus
  Clone ID: 59-BOVMS1-013-Q1-E1-G4
atgcgacgtcatagctcttctatagtgtcacctaaattcaattcactggccgtcgttttacaacgtcgtgactgggaaaaccctggcgttacccaacttaatcgccttgcagcacatccccctttcgccagctggcgtaatagcgaagaggcccgcaccgatcgcccttcccaacagttgcgcagcctgaatggcgaatgggacgcgccctgtagcggcgcattaagcgcagcgggtgtggtggttacgcgcagcgtgaccgctacacttgccagcgccctagcgcccgctcctttcgctttcatcccttcctttcacgccacgttcgccggctttccccgtcaagct

SEQ ID NO: 13720 - DNA, 396 bp, Bos taurus
  Clone ID: 59-BOVMS1-014-Q1-E1-G4
taatgatgttcggttactacttaataatgataatcttctcagggaaggagcagcccatgcatttgcacaatataacttggaccagtttaccccagtaaaaattgaaggttatgaagatcaggtactgataacagaacatggtgacctgggaaatggaaagtttttggatccaaaaaacagaatctctttcaaatttgatcacttaagaaaggaagcaactgatccaagaccatatgaagcagaaaatgcaattgaatcatggagaacttcagtagaaactgctctacgagcttatgtaaaagaacattatccgaatggagtctgcactgtatatggtaaaaaaatagatggacagcaaaccattattgcatgcatagaaagccatcagtttcaagc

SEQ ID NO: 13721 - DNA, 403 bp, Bos taurus
  unsure (380): unsure at all n locations; Clone ID: 59-BOVMS1-015-Q1-E1-G12
attgacctctctgccatcaagatcgagttctctaagcaacagcaggatgaattcaaggaggcgtttctcctgttcgacagaacaggtgaatgcaagatcaccttaagccaggttggtgatgtccttcgggctctgggcacaaatcccaccaatgcagaggtcaagaaggtgctgggaaaccccagcaatgaagagatgaatgccaagaaaattgagtttgaacaatttctgcccatgttgcaagctatttccaacaacaaggaccagggcacttatgaagactttgttgagggtctgcgtgtcttcgacaaggaaggcaatggcaccgtcatgggtgctgaacttcgtcatgttctagccatactaggtgaaaagatganagaagaaaaagtggaagcgctga

SEQ ID NO: 13722 - DNA, 344 bp, Bos taurus
  Clone ID: 59-BOVMS1-016-Q1-E1-G4
gtcaaccacgcgtcgggtgaaggcgcagaagtcgggccaggaaaccccaaatggtggcatcacctaggaacctttggtcatccacaccgggtccacctaaatggtgctctcatgatatgccaatgatgataaccactggcagagccttattttgtgaagacccatgactaactgtctaaatcagttcatgaccatttatacgaaccgatcactttgtacaattccaatctgagtgacaccctgaatttttatccattttaagtttcacactgaattaaattcataccacacatgcgattgtgtcagctgatccatcaaagattggtgagatattgccaatctca

SEQ ID NO: 13723 - DNA, 342 bp, Bos taurus
  Clone ID: 59-BOVMS1-019-Q1-E1-G12
atgcgacgtcatagctcttctatagtgtcacctagattcaattcactggccgtcgttttacaacgtcttgactgggaaaaccctggcgttacccaacttaatcgccttgcagcacatccccctttcgccagctggcgtaatagcgaagaggcccgcaccgatcgcccttcccaacagttgcgcagcctgaatggcgaatgggacgcgccctgtaccggcgcattaagcgcggcgggtgtggtggttacgcgcagcgtgaccgctacacttgccagcgacctagcgcccgctcctttcgctttcttcgcttcctttctcgccacgttcgccggttttcgccgt

SEQ ID NO: 13724 - DNA, 391 bp, Bos taurus
  unsure (147),(273),(301),(353),(376): unsure at all n locations; Clone ID: 59-BOVMS1-019-Q1-E1-G4
ctcaaagtgaatctctgctttcaaattacatcaactcctaaagtaccttacttccttttgtttctgatatttcttgtaaccatctatcagtatgacttaatgattggcttggcattctaccttttttcattgtactggctatcctgngaagggggaagacaaaaagagtctgttaaaaagaagtaacctcagcactattattactctctcttaaaagataagctatttagccccaaacgtttggattggtgaaagagactattcattgttcanagatcctttctcttgaaggatcatttanaaaggaatgcgtatgaagtttgctccttcatataagtaattattctatatangaccattatatttggatcaatanatacctatatgaata

SEQ ID NO: 13725 - DNA, 379 bp, Bos taurus
  Clone ID: 59-BOVMS1-020-Q1-E1-G4
atgcgacgtcatagctcttctatagtgtcacctaaattcaattcactggccgtcgttttacaacgtcgtgactgggaaaaccctggcgttacccaacttaatcgccttgcagcacatccccctttcgccagctggcgtaatagcgaagaggcccgcaccgatcgcccttcccaacagttgcgcagcctgaatggcgaatgggacgcgccctgtagcggcgcattaagcgcggcgggtgtggtggttacgcgcagcgtgaccgctacacttgccagcgccctagcgcccgctcctttcgctttcttcccttcctttctcgccacgttcgccggctttccccgtcaagctctaaatcgggggctccctttaaggttccgat

SEQ ID NO: 13726 - DNA, 443 bp, Bos taurus
  unsure (419): unsure at all n locations; Clone ID: 59-BOVMS1-021-Q1-E1-G12
tcaggatgcaatccaggagaaattttacccacctcgcttcattcaagtgccagagaacatgtcaattgaagaaggaagattctgcagaatggacttcaaagtgagtggactaccagctcctgatgtgtcatggtatctaaatggacgaccagttcaatcagatgattttcacaaaatgatagtgtctgagaagggttttcattcactcatctttgaagtggtcagagcttcagatgcaggggcttatgcatgtgttgccaagaacagagcaggagaagccacctttactgtgcagctggacgtcctggcaaaagaacacagaagagcaccaatgttcatctacaaaccacagagtaaaaaagtgtttgagggagaatcagtgaagctagaatgccagatctcggctgtacctccaacanagcttttctggaaaagaaataatg

SEQ ID NO: 13727 - DNA, 463 bp, Bos taurus
  Clone ID: 59-BOVMS1-022-Q1-E1-G4
acgctgccggtaccgccggaaatcccggggccaacccaaaaaaccttgataagggtgagggttcacgtattgggccatcgccctgatagacggtttttcgccctttgacgttggagtccacgttcttaatagtggactcttgttccaaactggaacaacactcaaccctatctcggtctattcttttgatttataagggattttgccgatttcggcctattggttaaaaaatgagctgatttaacaaaaatttaacgcgaattttaacaaaatattaacgcttacaatttaggtggcacttttcggggaaatgtgcgcggaacccctatttgtttatttttctaaatacattcaaatatgtatccgctcatgagacaataaccctgataaatgcttcaataatattgaaaaaggaagagtatgagtattcaacatttccgtgtcgcccttaatcccttttttg

SEQ ID NO: 13728 - DNA, 341 bp, Bos taurus; identical to SEQ ID NO: 1622
  Clone ID: 59-BOVMS1-023-Q1-E1-G4

SEQ ID NO: 13729 - DNA, 455 bp, Bos taurus
  Clone ID: 59-LIB188-001-Q1-E1-G4
ggccgcgggatactggagggagttacccttgcttccctccccttctgtgaccccagggtcccagctggctgggtcctcttcctccccccatgtcccttttcctctggccatgttgggagtgagcacctcacattgttgtctgttactgatttttttgataaaaagataataaaacctggtacgatgagtccggcccctccatcgtccaccgcaaatgcttctaggcggactgttagctgcgttacaccctttttcttgacaaaacctaacttgcgcagaaaacgagatgagattggcatggctttatttgttttttttttgtcttttttgattttttttttttttttggcgcttgactcaggatttaaaaactggaacggtgaaggtgacagcagtcggttggatcgagcattcccaaagttctacagtgtggccgaggacttgattgtacctgc

SEQ ID NO: 13730 - DNA, 243 bp, Bos taurus
  Clone ID: 59-LIB188-002-Q1-E1-G4
tgggcgcgggatactcgtcaaccctctccttgaagtcctccctggcgtgggcgccgcgcgactccttccgggcctccgctccgtagatggtctgcagagcacaaagcatcaggttctgcagctccagggtctccaccaggtcagtgttccagaccattcccctgtcgaacgtcttcagatgccgcaggtctccgtagaggctgctgatcttctcacagccttcctgcagcacactccccacac

SEQ ID NO: 13731 - DNA, 411 bp, Bos taurus
  Clone ID: 59-LIB188-003-Q1-E1-G4
ccaaggccgccggataccgtgcctagtttttgacactctcctggtcgtcatacgccacccactggttgcccttggtggcataggggacctgctggtcacggaatctgtgggtggcggctccgtggaggaagtcacagatctcataataggcaaggatccctttctccttggtgaactggcctggaattcctggccctgagatgggggctcccacatctgtcttggaagaggccagagtgtagctcctcccaaaagtggggatacccatcaccagcttattggctggagcccccagcctcagcatgtagctcacagcgtagtcagcgttactgaatctgtcagaacttgcatcttcctggcctcgaaacagggggctgtggtgtccgactgtctggcgccaggctccgtgaa

SEQ ID NO: 13732 - DNA, 338 bp, Bos taurus
  unsure (322): unsure at all n locations; Clone ID: 59-LIB188-004-Q1-E1-G4
catgcacgcgtacgccgtcgggacccttgtttcatcggaagaaataggtctttcaattgggcatcaagaaaaaagcagcatcaacccggtcattaggcattcctcggcccagctccttaatgtgcttggggtacccaggctccagggaagcttcgtcaaacacccattgcttgtctcctttgaagaagacaaacttgccatccttcctctcataggcagtgttgatggatgcgggcaggccccgccagaactggccgatgggcatggggtatccgtccatcacctggtttttccttacgcgccagaaccaacgctccttgangacaaacatctcccct

SEQ ID NO: 13733 - DNA, 385 bp, Bos taurus
  unsure (376): unsure at all n locations; Clone ID: 59-LIB188-005-Q1-E1-G12
gggatacaaaaacattacataaattaaaaggatgaatacatttacaggtgtgaatgcaaactgttccaactcaagggaagtaacaaaaacagtgctctggtgggaaatcttcagtaagaaaggaaagcaagtcctacggcttggaccttctcaaccccgtgtaagaccggccaagacagaaatgacaactgtttcaaggactcttgccagcctctagagaaatcctggaataagcagctctgacacattaataccctgcacagactgagagactcagtctcccagattcttatcaagccattggatttctcttccataaacattctcacctcagctcgaggtgagagagccgcatataactaggggtttaaatcanagatatgca

SEQ ID NO: 13734 - DNA, 421 bp, Bos taurus
  Clone ID: 59-LIB188-005-Q1-E1-G4
acaacctcttgttggacatgcagaatcgactcaataaagtcatcaaaagtgtgggcaagattgagcactccttttggagatcctttcatactgaacgaaaaacaaaaccagccaccggcttcatcgatggcgacttgattgagagtttcctggatatcagccggcccaagatgcaggaagttgtggcaaacctacagtatgacgatggcagcgggatgaagcgagaggccactgcagatgacctgatcaaggtggtggaggagttaactcggatccattagccaagggcagggatcccttcccagaccctctctgaaggctttgccctcctgctctcctcctccctgccactgtctctcggccatgggaagcctgtccctaagccccagaagccacagcctaactgagtggaaatggggat

SEQ ID NO: 13735 - DNA, 388 bp, Bos taurus
  Clone ID: 59-LIB188-006-Q1-E1-G4
cgggctacacgcgcagcaaccactgggctgtcggacacttaatgggaaaaaagattgtggcagagtccccacaacttcatgaggaggaaagcctgaaggagcacctgagggagtatgcccagtgggaagaagcgacaaggaacttgctaagcctcctacaagcaaagggggcccgaggccaccagatgcctccatgggagcccctgaccattcaccagcctgcctgggattccgaggacgtcagcaacttcaaagacacaggtcctcagcatgaaggaaggaacccccagctgaactgacaatgacgatggccgcctccctcaaagaagcaaaacaaaatccttaagaaactgcgttctatgggcatcagttctactggatcatcaac

SEQ ID NO: 13736 - DNA, 391 bp, Bos taurus
  Clone ID: 59-LIB188-007-Q1-E1-G12
gggcccgggctacagcgccaaatcaaccttcaagggaatctccaaaacccaagaaccaaatcctttgacaacaaggtccctctggccggttggaaacccaaagacctggaagctccgaaacttgttttttccaaatttctcctgcgccttgctgagaagcttccagatcaagtcttccttgccatccacgcttcgggccacgacagcatgagaagggacctgggccaggtggcactccttgaacgcatccactggcgcccgactgttgttcaggcagagaagctcatactggtccctgtcagccttctctggcaagttctcaaacactgtcgtctctttaacaaaagccacgtctccagccccgtcctgcagacacttgaaggcaccagaa

SEQ ID NO: 13737 - DNA, 205 bp, Bos taurus
  Clone ID: 59-LIB188-008-Q1-E1-G4
gccgcgggatacacatagtccacgcccggctcgcaagccttgtccagccggtcctccagagtgacctccttctccgtgtggtgcatgaagcagttctcctctgcacagcggcaggtatctttgtggcagagtttgctcagcattccgtcctctttatccgggtgatagaagcggatacaagtttcatccaggttgtaataggagt

SEQ ID NO: 13738 - DNA, 396 bp, Bos taurus
  Clone ID: 59-LIB188-009-Q1-E1-G12
tggccgcgggatactcctagtacaacctggatgtcacctgtcacgacttctatcacccggataacgaggatgggctgctgagcagtctctgcaactctgatacctgtcgcagtgcattcgagatctgcttcatgcactacacggtgaatgacgtcactctggaggaccagctggacaacgcttgcgtcccgggcgtcaacgatgtgtacgccatgtgcatcggaggctccatcatgacctccctgtcgaccttccagcaggtgtggctcagcaagcacgagtatgacgattctggcccctccattgtcaaccgcaaatgcatctagctggactgcaaccatatgcgtctgatttgccgcatgcattatctgatggctataaatttgccgtgggaaa

SEQ ID NO: 13739 - DNA, 363 bp, Bos taurus
  Clone ID: 59-LIB188-009-Q1-E1-G4
acggaattctgcagttctgacactgattacgtaagggttgctgctatcagccttgcccactgtgacttctccaaacccaaggaggaaccctagataaaatgccccaacactgtgatgagagcatccagatgttgccatgagaaaccggaaggcagatcttcacagaagccccaagggctcactcctgcccagtgttacgaggcagggttgttgacagctcctgtctcactgcagcctctagcacttggtcagtcactctccgccttagcactttgttcactgtcctgtgtcagagctctgagctcgctctacccttttctgaaaaagtatgtgggctgaaagtggtttcactttttgtttttt

SEQ ID NO: 13740 - DNA, 386 bp, Bos taurus
  unsure (226),(247): unsure at all n locations; Clone ID: 59-LIB188-011-Q1-E1-G12
gccggatacttatgataagccagcccaccgggcactttgacaagcttgttgttgttcaaatgaagttccctcaaatgaggagtgttggccaaagagccattgtcaaccgcagagatgctgttgaaactcagtcccaacttagccaaattattcagtcctttcaggctagctgcatcaactttggtgattttgttgccatcgagatgtaattcagtaagggaaggangaagaccttgagggatggtanttatatttgtgtcagcaatgcggatgtaagagagcttcttcattccctgaaaggctccattttcaatgcctgagctcttcaacgggttggtgccaagttctacgacgatcatctggttcaatccattgaacacagactt

SEQ ID NO: 13741 - DNA, 256 bp, Bos taurus
  Clone ID: 59-LIB188-011-Q1-E1-G4
gatacacatagtacacgccccggtcccaaggcttggccaaccggtcctccaaaatgaagtccatcaccgtgttgtgcatgaagcaattcacctccgcacaacggcaagtaaccttggggcaaactttggccaacaatccgtcctccttaacccggtgatacaagccgatataagtttcatccagggtgtaaaaacgagtactataaggtcagggataaaattctgaaggtacgtgagaagatacatcagattaact

SEQ ID NO: 13742 - DNA, 307 bp, Bos taurus
  Clone ID: 59-LIB188-012-Q1-E1-G4
cgccaaagccgcgggatacttcgaaacatcaatgagccaactgctgctgccattgcctatggcttagacaaaaaagttggagcagaaagaaacgttctgattctttgatttacggggtggcacttttgatgtgtcaatcctcactattgaggatggaatctttgaggtcaaatctacagctggagatactcacttgggtggagaagactttgacaaccgcatggttaaccattttattgcggagttcaagcgtaaacacaagaaggatatcagtgaaaacaagagggctgtccgtcgcctccgttgt

SEQ ID NO: 13743 - DNA, 422 bp, Bos taurus
  Clone ID: 59-LIB188-013-Q1-E1-G4
acttggtcaaacatttttgtagatatttctatgaaggttttaggttgtgtttttttttttttttttttagaagagattaccctttaaatcagcagactttgagtaaagcagattaccctccatagtgtgggtgggcctcatcgaataagttgaaggactgaacagaccacgcttgcaaccccatggccctgaattctccaggccagaatactggagcctttcaccttggatcatcccaatccagggatcgaacccagatctcccagatctatattgcaggtagattccttaccagctgagccacaaaggaagtccaagaatactggagtgggtagtctatcccttctccagcagagcttcccaacccaggaatcgaaccagggtctcctgaattgcaggcagattctttaacaactgagctc

SEQ ID NO: 13744 - DNA, 395 bp, Bos taurus
  unsure (22),(26),(28): unsure at all n locations; Clone ID: 59-LIB188-014-Q1-E1-G4
ccaagggcgcgggatacatgangaanangccgtggatgttctcgtcagctcaggagagggcaaggccaaggatgcaggacagagaaccaccatttacaagagagacccctctaagcagtatggcctgaaaatgaaaacttcccgtgccttcttcagtgaggtcgaaaggcgttttgatgccatgcccttttctttaagagcatttgaagatgagaagaaggcccgcatgggtgtggtggagtgcgccaaacatgaactgctacaaccatttaatgttctctatgagaaggagggtgaatttgttgcccagtttaaatttacagttctgcttatgcccaatggccccatgcggataaccagtggtccttttgagcctgacctttacaagtctgaga

SEQ ID NO: 13745 - DNA, 419 bp, Bos taurus
  unsure (214): unsure at all n locations; Clone ID: 59-LIB188-015-Q1-E1-G4
gccatagccgcgggatacggaattctgcagttctgacactgattacgtaagggttgctgctaacagccttgcccactgtgactttctccaaaccaaggaaggaacctaaataaaatgccccaacactgtgatgagagcatccagatgtttccatgagaaaccagaaagcagatcttcacagaagccccaaaggctcactccttgccagtgttangagacagggttgttgacagctcctgtctcactgcagcctctagcacttggtcagtcactctccgccttagcactttgttcactgtcctgtgtcagagctctgagctcgctctacccttttctgaaaaagtatgtgggctgcaggtggtttcattttttgttttttaattgtaaatctttttgtatgagaaaaactatattttgta

SEQ ID NO: 13746 - DNA, 282 bp, Bos taurus
  Clone ID: 59-LIB188-017-Q1-E1-G4
agcgggatacaagagaaactttttgaaaccatcccttgttcaggaaaacctcaacagtattaagctgataactgtcaccagtggtggtaagacaaccggtaaaactgacggatcaaagccaaaccaccttggcagtatttccccgtcccatgaccacctaacttattccgagccgcagcttccaaaccattgccatttcaagggacattgacacagcaaccaagttcattggaactggggctgccacaataggggtggctggctctggacctggaattggga

SEQ ID NO: 13747 - DNA, 354 bp, Bos taurus
  Clone ID: 59-LIB188-019-Q1-E1-G12
ccgcgggatccataaactctcacaaatacccagttcttcaccatctcccctcctcactttgcagtgccatttctttttgcattatgcaatttgctcaaactttccaggcccatggcacatcagttccctggagtcgcccacacttctgcaaagtggctaacaatgttcagaaagtctgctccgttccaaatcaacttcacgatatccaggacaggaatgctgttgcaaccagacagacgaggtccaaaagcgatgatcattttctcatagtctataggaaaggcaagtatcacattggttttcctttgggttatcggtgatccattttcagatctgcataggtgtcagcacaga

SEQ ID NO: 13748 - DNA, 434 bp, Bos taurus
  unsure (383): unsure at all n locations; Clone ID: 59-LIB188-019-Q1-E1-G4
gccaagggcgcgggatacccccatagggtcaggagatgtggtctggccagcctgagccactaggcctctcctctctgcataggataagccccatagccagggcctgatcagccctcccagtcaccctttgtctagagggacataggtcatcctaaccaggctgagcctgtgacttagtaaaccagtttagttctcaagctgtgcaggcaacagatgccaatgggctctactggactgtctagtacaactttccaaagctggaccatgaagacataataaatcttatcagacccatcatatgcacagaaattgaaactgtaatcaacaatcttccagcaaacaaaagcccaagtccatacggcttcacagctgaattctaccangaatttagagaagagctaacacctatcctactccaattcttccagaaagtt

SEQ ID NO: 13749 - DNA, 416 bp, Bos taurus
  unsure (157): unsure at all n locations; Clone ID: 59-LIB188-020-Q1-E1-G4
cagccacagccaatggaagggcacgaccgcccgcagcaagatggcaatgatccgtgtgaagtaaatgtagcagatgaccatgacatagtaatgccggaacagcttcagcttggccaggttcactgccaccttcccatcagtgccagacgcgtcctgnagatgccggatggaccagaccacggggaacaggatggtgccacagcagatgagatccaccaggaagaggatctccttccagataccgtagtcgctggcaccctcctcgcgggactccatgacaatgtaggccacgttggccaggacctgcagtgggatcactatcccaaagatcttcttctccttgtctgacagcacatacttgacgaaggcccagccggagccgatcaaggcaatggtgatgaagaggagggcacctt

SEQ ID NO: 13750 - DNA, 391 bp, Bos taurus
  Clone ID: 59-LIB188-022-Q1-E1-G4
ccggatactctggctataccggggctttcaggtgcctggctgaggactttggggactttccctttgtaaaaaacaacacattctgggaaaacacaattggaaaaagcactgcagactggcctaagaacttgaatcgtgaggacttcaggttgctctgcctcgatggcaccaggaagcctgtgacggaagctcacaactgccacctggcggtggccccgaatcacgctgtggtgtctcggagcgatagggcagcacacgtgaaacaggtgctgctccaccagcaggctctgtttgggaaaaatggaaaaaactgcccggacaagttttgtttgttcaaatctgaaaccaaaaaccttctgttcaatgacaacactgactgtctggccaaact

SEQ ID NO: 13751 - DNA, 236 bp, Bos taurus
  Clone ID: 59-LIB188-023-Q1-E1-G4
atacagtcatatcatacttttaattaattgcgcttaaggccttaattaaatctggaggttcccttcttagagcagctcatactgacggaggtgcatgcgctggatgatgtcacggcagtcgttgaacacacggcggatgttctcggtgtccacagcgcaggtgaagtgagggtagcagtagtggcgcccgtctccactagcagtgctgattctcagaaattcatctcgaatgaagt

SEQ ID NO: 13752 - DNA, 438 bp, Bos taurus
  Clone ID: 59-LIB188-024-Q1-E1-G12
ccatagccgccggatactgggggtatcccttgaggtcgtaagtggccccatccagacccatgatcagatattctttcccaggttccaactgaaggcggcaagaggctcggaccaggaagtttctggtctgatcagcggtggccctggcatccttggtgaaatgcaggacttgggtgatacgggtctcaaagaggcggaaagcagccctgctgtcttctcggagaaccttaacctggaagccgtagtccactcggggagagtagcaggcgaatttcatccggtaaccctccaagtcctgctgcccacgctccagggcccggcgctgtcgagggcacttcccctcagcacactggcagacatccgcagagcacagcgtggacaagagtttgctcttacgtggtgccccataaaacacagaacacttgtgctcaaggttgt

SEQ ID NO: 13753 - DNA, 217 bp, Bos taurus
  Clone ID: 59-LIB188-024-Q1-E1-G4
tcgtgctccgtgctcacaagcgtggacatgagctcgttcttacaaacctgactttctgggtccacagtcagtgcacgcatgttggccacgttgatgacgtctaagtcatccaccgtgtcctgactgctctgcacgttgatacgatgaaacgtcacgcgattgggcttcaatttggacttctccagattctttacgctagcattgaagacagctgtgc

SEQ ID NO: 13754 - DNA, 383 bp, Bos taurus
  Clone ID: 59-LIB188-025-Q1-E1-G12
gtccaaggaagaaccgggattcgggaaggggaaatggcaacaacccgggtggaaaaaagcatctaattggtccccttttccgaagctcagatgtgttgagatgccagtcaacacacgggaaaatccctgaaaggtaagttcgcaagaggaacgagaacgtgaagacctgaggaaaacccacctggtgttcagcatcgaccccagcggctgtgaagacgtggatgacaccctttcagtccgagccttggataatggcaacctggagcttggagtccacattgcagatgtgacgcactttgtagcaccacactcctatattgacattgaagctaggacaagggccaccacttactacttagcggaccgtcgctatgacatgctgc

SEQ ID NO: 13755 - DNA, 296 bp, Bos taurus
  Clone ID: 59-LIB188-026-Q1-E1-G4
actttctcactcccgtcagggaaggcagaaaagctcctgccactgttctctccaaatgtggccttacggccatagctagtgtggatgaccaagtgccggaggaaaagcttgtaggagccatcaactcctgtaatgtattcaccggactgcaggacaaattcctgaagggtcccacctggggctccatatttctcactccagtaggagccaaacctcacctggatactcttaattatgccaccaatgcctataaacactctgatcccggtgatctcattttcattgtctttagttgt

SEQ ID NO: 13756 - DNA, 377 bp, Bos taurus
  Clone ID: 59-LIB188-028-Q1-E1-G12
cgccattggcccgggagacctgctgaccctgcactgtgcgctgtgctggccccacagccccaccccggcctgcccctcaaccagagctgagctcagactgcagagccgtggccctcacatgggcccaaggaagggaggctgaggctcagcggggccccagcagggcaggagatcaggcttctggtcagtcagagccaagtgtgagaggcgtctctgccccactgtgagcccaagggcagaaggctacacctcagcaagcacatctttgatggcacttgtgagaggaaaggccaggttctgcccacagaaggtgccccggaagtcatccaagtccagggcccacaccatggcgccagccagctgcctgttcttcaggt

SEQ ID NO: 13757 - DNA, 372 bp, Bos taurus
  Clone ID: 59-LIB188-028-Q1-E1-G4
agccatgtacgcgggatagcacgcttttttttttattttttttttttttttttgtgagaagataattggcattttatagggaatgaaaatcaacagcatttctaattttatttcttgctaaaatgacagcagggaattgtaaatactgatgagcttggcaaaaatccgacttcaggaagggagaggaaggtccctcgcgcctggagattggggctgagagcagggaggagctgaggcccagggaggcaggctagcttctttgcaggctttacctcgtcaggaaggcgcaggcttccagaagcggggaggttgagcattttttcaggttggcaatggccgtgacatactctgtccccaaatattcttcatacg

SEQ ID NO: 13758 - DNA, 415 bp, Bos taurus
  Clone ID: 59-LIB2809-001-Q1-E1-G4
gacactcgcttcgacatattctttctctaatgtatttggccttgtcatcacgttctgggtatcggaaagccattttattaccatacaggtattctgttaccttggcatcatcatggatagaaacttcctgaatattagaaagtggtgggtaaagtctcccctgagccagctctttatctgtcaactgacttgtcacagcctttgcaacttccaggaacacatggtcactaatatgccgggtgttacagacaattacaactaaagccacacctggaaaaatatatacattggttccttggactgctgtaaaaacttggccatcactgagtttcactggctcaaatggactgtcactggcaaacaaagacctttcctctggtagcgtgtatgcgtcttcagctgtgcactcagcctg

SEQ ID NO: 13759 - DNA, 404 bp, Bos taurus
  Clone ID: 59-LIB2809-002-Q1-E1-G4
catgggcgcggcatacaccagcaggaaattgctcccaatagtgctgaagaacgacttcacagtatgaaagagggaatccatgcccaacagataaaaacctatgatacgagtgaatcacgaactggcctacttctaccctgaacttttcagacaattctaccagtctggatgcctatccatctggtgcctggtattacattctactaagcacacaatacactgatgctccatcaatctctgacatctctaatcccattggctctgacaatagtgtcaagactactatgccactgtggtgaatagtcaagtgaactctgagggactccacagttattgtctttgatggttctgaaaattccatgctctacatgtcttttcatctatcacgtcaaaccattctatcc

SEQ ID NO: 13760 - DNA, 507 bp, Bos taurus
  Clone ID: 59-LIB2809-003-Q1-E1-G12
acgccgaaagcatggccaggcgataccagcctcggattggtgatccaccctctcttggtagcctcctgtatgaaagaaggggaccaggacctgggcgattcaggaagttgcaaactgggaagaactaggccctgggggcttggtctattgatctgggaagacctggaaagaaacttctcacttttggaggaggactgatgagtgccgttagagtggctttagcaaaatattgagccacttcctaaatgccttgccttctggataggtccagaagcaaggtctcagacttaagatccagtgccgttccaaggtgagtcaatcagttggcaaatacatagtgatctctgaacaatactgctcatgcaagttggggctctatgccaacttggacagccgcactggagctccatggagtttatttttttttaatttgctgcagagacttcgacgacccaggagatggttaatgaagtcactattttggctcaaaactcccattccctgccc

SEQ ID NO: 13761 - DNA, 339 bp, Bos taurus
  Clone ID: 59-LIB2809-003-Q1-E1-G4
acaaccttttttagttttttttttgtctttttggtgccataaaatgtaatttattgataagaagaatgacaaaatctcagttaatgcacacaattatttgatatgacaggcacttacaggagaactgattcaaaggcttttaaaacattttccacacagaaatttactgaacactttaattccctttgactcattgggctttaaaccagcatgatactacaggtatttaggtaacaacctgttaggacaatttcacttaaggatgttacactatcaacagtacagtagagaactcaagaacacagagtgacgtcaatttgatattgccctattctaaaa

SEQ ID NO: 13762 - DNA, 426 bp, Bos taurus
  Clone ID: 59-LIB2809-004-Q1-E1-G4
ccatgaccgccggatacctggtgagattgtggaaagcctttcaagcagtgaggaatcgattacacgcatcagtaagaaaattgagaagtttcagagtgaggaacagcagcagacagaggatgaactccagcatagaagccacccctttgcccaggcacagtctcgagtcgatcccttccctgggcccatccctaacagcctcccacaaaacatccctcctcttactcaaacccctgtggtggtgccgcctttccttcagcctgaagtaatgggagtctccaaagtgaaggaggctatggctccgaagcacaaagaaatgcccttccctaaatatcgagttgagccctttactgaaagccagagcctgactctcactgatgttgaaaatctggcacttcctctgcctctgctccagtcttggatgca

SEQ ID NO: 13763 - DNA, 397 bp, Bos taurus
  unsure (57),(83): unsure at all n locations; Clone ID: 59-LIB2809-006-Q1-E1-G4
gccatgggaacgggatacggccgaaaggcctgaataggcatatctctctggggatanggcactgctttctggggaacaggcangactttggactgagaaagggacagcacggactgaggaggaaacatgacagttggaggaagaggctggtgaggctggtgcatccaagactggagcagaggcagaggaaggcgcagattttcaacatcagtgagagtcaggctctggctttcagtaaagggctcaactggatatttagggaagggcatttctttgtgcttaggagccatagcctccttcactttggagactcccattacttcaggctgaaggaaaggcggcaccaccacaggggtttgagtaagaggagggatgttttgtgggaagctgttatgga

SEQ ID NO: 13764 - DNA, 287 bp, Bos taurus
  unsure (6): unsure at all n locations; Clone ID: 59-LIB2809-007-Q1-E1-G12
cagcanaaaggcctgaatgggcaaaaccccccggggaaaaggcactgccttccggggaacaagcaagaccttggactgaaaaagggacaacaccggccgaagaaggaaccataccatttgacgaaaaagcctgttaagccggtgccaccaaaactggaaccaaaggcaaaggaaggtccaaatttccaccaccattgaaatccaggcccgggcttccattaaagggcccaccgggaaatttaggaaagggcattccttgggcctaaggacccaaacccccctccact

SEQ ID NO: 13765 - DNA, 401 bp, Bos taurus
  Clone ID: 59-LIB2809-008-Q1-E1-G12
acctctaaggggattgcgtccgagatgtggagaatatcatggtggaagagtttgtggaagggggaaccctggacctcttcatgcatcggaaaagtgacgtcctcaacaaaccctggaagtttaaagttgccaaacagctggccagcgccctgagttacttggaggaaaaagacctggtccacggaaatgtgtgcactaaaaacctccttctggcccgcgagggcatcgacagtgagtgcggccccttcatcaagctcagtgaccctggcatccccatcactgtgctctccaggcaagagtgcatagaacgaatcccctggattgctcccgagtgtgttgaagactccaagaatctgagtgtggctgctgacaagtggagctttggaaccacactctgggaa

SEQ ID NO: 13766 - DNA, 432 bp, Bos taurus
  Clone ID: 59-LIB2809-009-Q1-E1-G4
caactagatttgaagttgatattaatagaaattattccaaaattattcttaggtcacaaataactactatcccacataaaaagggaaaaatccaacccaattaaggaaaaggtatcctgtgtatgtttccatggcaatgagtttatgcattctcagattttgtccggctagttatccaccctttatctgatgcatttattccatctctcagagagaaccatatagattcctgacggcatccaggacacgtggctcgtggtggacacacttcatggtggatactgctactataaaaatactcagaacttaagagaattccaagatgctttataaaaagcattagtcatgcctcaaaactgccctttgaggtaggtcagtattattatcccattttaacagaacgaaaactgaggcacattagagttaaatgac

SEQ ID NO: 13767 - DNA, 397 bp, Bos taurus
  Clone ID: 59-LIB2809-011-Q1-E1-G12
tgagagtgacaatcactgcacagaaagcagatctgttttcaagtttcttagcaattctgatagaatattcactgtaatcaggactgcctcagttcagttcagttcagtcactcagtcaggtccagctctttgtgaccccctggaccgcaccacaccatgactccctgtccatgaccaacacccgaagcttgctcaagctcatgtccattcagtgatgccatccaaccatctcatcctctgtccgcttctcctctcctgccatcaatctttcccagaatcagatcttttccactgcatcagttctgcaaatcaggtggccaaagtactggagtttcagcaaaagtctttccagtgaatagtcaggaccgatttcttttaggattgacggaagacttat

SEQ ID NO: 13768 - DNA, 463 bp, Bos taurus
  Clone ID: 59-LIB2809-011-Q1-E1-G4
gccatggcggcgggatcacaagcttatttttatttttttttttttttttttttttcgccttaaaatgtaatttattgaaaagaagaaagacaaaatctcagttaatgcacacaattatttgatatgatggcacttacaggagaagtgattcaaaggcttttaaaacattttccatacagaaatttaatgaagactttaattccctttgactcagtggcctttataccagcatgatactactggaatttaggtaacaagctgttaggacaatttcacttaaggatgttacactatctaaaatacagtagagaactcaagaagaaagagtgccttcaatttgagattgccctattctaaaacagcagttgaagcctttggatagaatggtttgacatgatagatgaaaagacatgtacagcatggaattttcagaaccctcaaagaccaaaactgtggagtcccc

SEQ ID NO: 13769 - DNA, 382 bp, Bos taurus
  unsure (122): unsure at all n locations; Clone ID: 59-LIB2809-012-Q1-E1-G4
gccatatgggcgggatgacagcagaaaggcctgaatgggcatatctctctggggatagggcactgctttctggggaacaggcaggactttggactgagaaagggacagcacggactgatgangaaacatgacacttcgaggaagaggctggtgacgctggtgcatccaagactggagcagaggcataggaaggtgcacattttcaacatcagtgaaagtcaggctctggctttcagtaaagggctcaactggatatttagggaaaggcatttctttgtgcttaggagccatagcctccttcactttggatactcccagtacttcaggctgaaggaaaggccgcaccaccacaggggtttgagtaagaggaaggaggttttgt

SEQ ID NO: 13770 - DNA, 412 bp, Bos taurus
  Clone ID: 59-LIB2809-013-Q1-E1-G4
ggatacttcatcatcaggaacagctgcccaaatcaacgtgattccaccatctccgtggaagagaatggggtgtcagcagaaagccggttctcagttcagatgttcaagtttgctggaaattatgacctagttttcctgcattgtgaggtttctctctgtgatttcattaaagaagagtgccaaccgtcttgctcaagaagtcaactccgcagtgaaggggtggctattgatccagcccgagttctagatctgggacccatcactcgcaaaggtgcccagtctcttggtgtcatgagtggaacacccaacactgcagggttcctggtggcccggcccctggttctcctgcctgtcctcctggctgggctgttctgagagctcagctgggcatctggccttgaaacttgtgttc

SEQ ID NO: 13771 - DNA, 328 bp, Bos taurus
  Clone ID: 59-LIB2809-014-Q1-E1-G4
aaaacaatgacagaacagaatatggactcttccagataaataataaaatttggtgcaaagacgaccagaaccctcactcaagcaacatctgtaacatctcctgtgacaagttcctggatgatgatcttactgatgacattatgtgtgtcaagaagattctggataaagtaggaattaactactggttggcccataaagcactctgttctgagaagctggatcagtggctctgtgagaagttgtgaacacctgctgtctttgctgcttctgtcctctttctgttcctggaactcctctgccccgtggctacctcgttttgcttctttgt

SEQ ID NO: 13772 - DNA, 327 bp, Bos taurus
  Clone ID: 59-LIB2809-016-Q1-E1-G12
gccatgagcccgggatgcccggtaagattgtgaaaagcctttcaagcagtgaggaatctattacacgcatcaataagaaaattgagaagtttcagagtgaggaacagcagcaaacagaggatgaactccaggataaaatccacccctttgcccagacacagtctctagtctatcccttccctgggcccatccctaacagcctcccacaaaacatccctcctcttatccaaacccctgtggtggtgccgcctttccttcaccctgaattattggaattctccaaattgaaggaggcaatggcccctaagcacaaggaaatgcccttcc

SEQ ID NO: 13773 - DNA, 343 bp, Bos taurus
  Clone ID: 59-LIB2809-019-Q1-E1-G4
ggacacagcaaaaaggcatgaatgggcatatctctctggggatagggcactgctttctggggaacaggcaggactttggactgagaaagggacagcacggactgaggaggaaacatgacagttggaggaagaggctggtgaggctggtgcatccaagactggagcagaggcagaggaaggtgcagattttcaacatcagtgagagtcacgctctggctttcagtaaagggctcaactggatatttagggaagggcatttctttgtgcttaggagccatggcctccttcactttggagactcccattacttcacgctgaaggaaaggcggcaccaccacagggg

SEQ ID NO: 13774 - DNA, 345 bp, Bos taurus
  Clone ID: 59-LIB2809-021-Q1-E1-G4
cgtatgtgtatgatacataaggttatgtattaattgtagccgcgttctaacgacaatatgtacaagcctaattgtgtagcatctggcttactgaagcagaccctatcatctctctcgtaaactgccgtcagagtcggtttggttggacgaaccttctgagtttctggtaacgccgtcccgcacccggaaatggtcagcgaaccaatcagcagggtcatcgctagccagatcctctacgccggacgcatcgtggccggcatcaccggcgccacaagtgcggttgctggcgcctatatcgccgacatcaccgatggggaagatcgggcttcgcacttccggctcatg

SEQ ID NO: 13775 - DNA, 216 bp, Bos taurus
  Clone ID: 59-LIB2809-022-Q1-E1-G4
atcaagggcatgcacttgccccgagaaatgcctgtttgtgagtcctggaagaatgattattttttaaaacgttttgttgcttctcttgtgcgtctgaattcccttttgtacaagcttttttttttttttttttttttttttttttccattgcatttgattggctttattatgcaggaatcaaaacattaaatctggcataaaagtaacatgtaaca

SEQ ID NO: 13776 - DNA, 372 bp, Bos taurus
  Clone ID: 59-LIB2809-024-Q1-E1-G12
accccaactggaaattgttcccaatagtgctgaggaacgacttcacagtatgaaagagggaatccatgcccaacagaaagaacctatgataggagtgaatcaggaactggcctacttctaccctgagcttttcagacaattctaccagctggatgcctatccatctggtgcctggtattacgttccactaggcacacaatacactgatgccccatcattctctgacatccctaatcccattggctctgagaacagtgaaaagactactatgccactgtggtgaagagtcaagtgaattctgagggactccacagttatggtctttgatggttctgaaaattccatgctctacatgtcttttcatctatcatg

SEQ ID NO: 13777 - DNA, 412 bp, Bos taurus
  Clone ID: 59-LIB2809-031-Q1-E1-G4
cgccaagggcgcgggatcccaatacacaccaattttatagacatcctggagaggcaaacgcaagggtttgtcagttgggcgagttggtggcagaatgcaatccagagcttcaagcagggtggttccactggcattgccgtccttacgggtgactttccatcccttgaaccatggcatattagcacttggttctagcatgttgtcaccattccagccagaaattggcacaaatgctactgtgtcggggttgtagccaattttcttaatataggtgctgacttccttaacaatttcttcgtatctcttctggctatagggtggctcagtggaatccattttgttaacgccaacaattagttgtttcacacccagggtgtaagccaaaagggcatgctcacgggtctgcccgttc

SEQ ID NO: 13778 - DNA, 369 bp, Bos taurus
  unsure (320): unsure at all n locations; Clone ID: 59-LIB2809-032-Q1-E1-G4
acctcattctaaactgcagggacccctgccctgtgtgagtgcaagaatgcagtgagcaggttacactgacccaagaaggtctacaatgaagatgctgaggtgaaaacctgagaccctacagaataaggaggcagagaccacaagtgactgctgtctctacccctggggggtattcagtcaaggctacattctttgagtgtggtccttagacagatctgacggcctggttgttgctttcaaccccggccttcatcaggtacttgcaataggtcacgcatggaaagcaatgagaggaggtgagtgagcctggaatgaagtanaaaggactgtgctgtcaaaggccaacccattcacagcctgtccctgccc

SEQ ID NO: 13779 - DNA, 358 bp, Bos taurus
  Clone ID: 59-LIB3057-001-Q1-K1-G4
tcggagcgattgcgaccgcgttgccgatctctagcagcaatcggcttctccacgtagaacccatgggtaggagattcagaatcgaatctcttctcccttccccctcctggttacaaatcacttgaaatatataagttagtggaacttgcttgagtgagatttttttgatcttcagctacatttttcagctttgtgaggcaccatatcatcaaagacaatggccagcaatgttaccaacaagacggatcctcgctccatgaactctcgtgtattcattgggaatctcaatacccttgtggtcaagatatctgacgtggaagcaatcttctcaaaatacggcaaaatcgtgggttgctct

SEQ ID NO: 13780 - DNA, 429 bp, Bos taurus
  Clone ID: 59-LIB3057-002-Q1-K1-G4
tttcgaccgacgcgtcctgcccaaactacccatactctaaaatgtcttcgttagatctttataacttatcttacaagcgccgattcttttacagccatgaaactctctcagttattccaaactgtcatttcatatcaaaaacatcacgtcttaaaacttttacttttaaccatatatattaaataaaagacccttctgtactcttttatattcttccttttcaaaatggctacttactgaattgttatgttcaaagacataatttgtattaccttttttgaaaataaatttatcatgttttctttttatacactaatattattatcacataaccatatttttaacttcactttaattcaataatcaattaatgaaatcttatttgaaaaataccattttcaagcattatttaacattaaattctttatc

SEQ ID NO: 13781 - DNA, 334 bp, Bos taurus
  Clone ID: 59-LIB3057-003-Q1-K1-G4
tcgcggacgcgtgggtcggtgtggttctccactctgagtgccactgcagcacttgttatgatcacggattctaatagtttgcagtgggccttgctgatgatggctgacttgctcaaaaggaaaattaatttgtccagcgtctatggctttgtgagataaaaccctgcttttccttgccataccattattaacctgctttgagaatatactgcagctctattgcttttgtccttattctacaatataatccgtagtcttgatgctttcatttggaatgaaatatggcatttatcatgaccatgaaaagctgattctactggaaataaagtctttt

SEQ ID NO: 13782 - DNA, 119 bp, Bos taurus
  unsure (72),(90): unsure at all n locations; Clone ID: 59-LIB3057-005-Q1-K1-G4
gacgcgcttggcgtggatggcacacaggttggtgtcctcgaagagccccaccaggtaggcctggcacgcctnctgcagcgccatcaccgncgagctctggaagcgcaggtcggtcttga

SEQ ID NO: 13783 - DNA, 414 bp, Bos taurus
  Clone ID: 59-LIB3057-006-Q1-K1-G12
cggattcccggtcgaccacccttccgttttgcccccggttggtaaggtgaaaacctaccgagaccctatttctgcgtaattgtttccaaggggcagcaagggaaaagggtttaaccatgtcgtctctggtcaaaaagataatcagcaccgcgaaagcccccgcggccattggtccctacagtcaggctgtgttagtcgacaggaccatttacatttcaggacaactaggcatggaccctgcaagtggacagcttgtgccaggaggggtggcagaagaggctaaacaggctcttacaaacataggtgaaattctgaaagcagcaggctgtgacttcacgaatgtggtaaaagcaactgttttgctggctgatataaatgacttcagtactgtcaacgatgtctacaaacaatatt

SEQ ID NO: 13784 - DNA, 397 bp, Bos taurus
  Clone ID: 59-LIB3057-006-Q1-K1-G4
atcgtgagcggccggcctttttttttttttttttttttttttttttttttttttgttttttttttttttttttttttttttttttttttttttttttttttttttttttttttttttttttttttttttttttttttttttttttttttttttttttttttttttataagaattcatatattaataaaatttttttgttttataaaaaaattttttttataatgataaaaaaaataattttaatatactgaatgataaagtattgagtgagaacaataatagaatatatatcaggatataaaataatatataacaatatacaaaaattttttaatggtacaccagaaaaaattttttgttagatatttaaaaaaaaatttaatcgattgctagtgat

SEQ ID NO: 13785 - DNA, 434 bp, Bos taurus
  unsure (381),(421): unsure at all n locations; Clone ID: 59-LIB3057-009-Q1-K1-G4
ggcggggacggcgggggaccggctattcgaggccaaccgaggctcccgcggcgctgccgtatcgttccgcctgggcgggattctgacttagaggcgttcagtcataatcccacagatggtagcttcgccccattggctcctcagccaagcacatacaccaaatgtctgaacctgcggttcctctcgtactgagcaggattaccatggcaacaacacatcatcagtagggtaaaactaacctgtctcacgacggtctaaccccagctcacgttccctattagtgggtgaacaatccaacgcttggtgaattctgcttcacaatgataggaagagccgacatcgaaggatcaaaaagcgacgtcgctatgaacgcttggccgncacaagccagttatccctgtggtaacttttctgacacctnctgcttaaaaccc

SEQ ID NO: 13786 - DNA, 425 bp, Bos taurus
  Clone ID: 59-LIB3057-010-Q1-K1-G4
aattccaggctcgacgtacgcgtgctgactgtcgtgacatcatccagctcatgcttcctccgtcagtatgagctgctctgggaatgtaacctgcagatttaattaaggccttaagcgcaattaattaaatgtaagatataattgtacacgctgtcgatcatcaatcatatggcatgattaatgtagctaccttttcgttgaatattgttttaagcgtaactttttaaaacattcagtgaatattgataattcctataggaaagtcttggaacaatgtttatgcatttattcagctttacgtggtaacagttctctcttgattctacaaacacattttacattcatgtttccgtagttgtcaagtgtatcatttatgttgggcatgtgaatatacaagtgcctgtgtaataaataaagtctattta

SEQ ID NO: 13787 - DNA, 360 bp, Bos taurus
  Clone ID: 59-LIB3057-011-Q1-K1-G4
tcaggccgcagctgttcccgcgtcacatgaggcaggctggaggccactcgtcgggggagggggcggtggctggagccggggcggagccgcgcgccgagcggggccggagccagggggtgcagctagagagcccctgagcagcggcgggagagcagcacacagcctgcgggagcccaggccaggcagccatggcggtggaaggaggaatgaaatgtggcaagtttctgctgtacgttctcctgctggtcttctgcgcctgtgcggtgggactgattgctgagggcgtagggacccacctcgtcctgaagcagactatcacccatggggccacccctaatttcctgttgcctgtggtcatca

SEQ ID NO: 13788 - DNA, 411 bp, Bos taurus
  unsure (244): unsure at all n locations; Clone ID: 59-LIB3057-013-Q1-K1-G4
gcaacaatggcaagaagctcatgacccgtccccttgtcaaacacccctttgaaaactgcagtttgttaactggcgagaaccccttgcaggtcctggtgaacgccatcatcaacagcggcccccgggaggactccacccgcattgggcgagctggaacagtgaggcggcaggccgtggacgtgtccccactgcgccgtgtgaatcaagccatctggctgctgtgcaccggcgcccgggaggccgncttccggaacatcaagaccattgccgagtgcctggcggatgaactaatcaacgcagctaagggctcctccaattcctacgccatcaagaagaaggacgagctggagcgcgtggccaagtctaaccgctgatcgctggctgcagccacaataaacctgtttccctgtg

SEQ ID NO: 13789 - DNA, 364 bp, Bos taurus
  Clone ID: 59-LIB3057-014-Q1-K1-G4
ccgcagccaactttgggagggtttcctggacagaggtccttgtggccactgccttaaggcacgtagctcaggccccagcggccagtgctctctgacccaggccaccgcaggcagcagcggcagcagcatggagctctgggggccctgcgtgctcctctgcctcttctctcttctgacccaggtcactgctgagacccccacccccaaggccaagaaggctgcaaatgccaagaaagatgctgtgagtccgaagatgctggaggagctgaagactcagctggacagcctggcccaggaggtggccctgctgaaggagcagcaagccttgcagacggtctgtctgaagggtaccaaggtgcacatg

SEQ ID NO: 13790 - DNA, 413 bp, Bos taurus
  Clone ID: 59-LIB3057-015-Q1-K1-G12
gttctagatcgcgagcggccgcccttttttttttttttttttcattaaaaaatagtggtcttgattataaattactgaaatgtttcttttttgaatataaatataaatatgtgcaaagtttgatttggattgttatttttgttgagttcttcaagcatctcctatcagccttgaaggcctgggtagggggaggggagaggactggaggtggaatctttataaaagacagagtgattgaggcagattgtaaacattattaaaaaacaaaaacaaaatccaaacaaattaacaaggaaaaaaagaaaaccaccccaacacacagcttacccatccagcccaatacctgacacagaaaacttgtgtgtgtttggtttttcccaaataaagaacatttccaggtatttccatttttg

SEQ ID NO: 13791 - DNA, 93 bp, Bos taurus
  unsure (19): unsure at all n locations; Clone ID: 59-LIB3057-015-Q1-K1-G4
ccccctttttttttttttntttttttttttttttttttttttttttgtttgtttttattatttgttttgtttttttttttttttttttttttt

SEQ ID NO: 13792 - DNA, 434 bp, Bos taurus
  Clone ID: 59-LIB3057-016-Q1-K1-G4
gttactcccaaattcctaatttatccctttccactttggtaaccgtaagtttgtttagtattagtccgtttatgttttgtaaataaaattcattagtatcatttttttagattacacttttaagtgatatcacatgatatttgtctttctctgtctgactctgttgtttttgttggttagtcactatattgtgtgcgactcttgcaaccccatggactgtagctcctctgtctgtgggatttcccaggcaaaaatactgaagtgggttgccatttccttctccatgggatcttcccacccagggattgaacctgcatctcctgcttggcagttggattctttaccactgagccacccgggaaggccccccctcactgacttagtatgataatctctaagcccatccatgttgctataaatggtattatttaatt

SEQ ID NO: 13793 - DNA, 293 bp, Bos taurus
  Clone ID: 59-LIB3057-017-Q1-K1-G4
ttccggccgaaccaggacccgaagcctaaattccaggagggtgagagagtgctgagctttcatgggcctcttctttatgaggcaaagtgtgtaaaagttgccataaaggataaacaagtcaaatacttcatccattacagtggttggaataaaaattgggatgaatgggttccagaaagcatagtactcaagtatgtggataccaacttacagaaacagagggaacttcagaaagccaatcaggagcagtatgcataggggaagattctaagggcttcccctggaaagaaaac

SEQ ID NO: 13794 - DNA, 336 bp, Bos taurus
  Clone ID: 59-LIB3057-018-Q1-K1-G12
tgtacatccttatcccgatggcacgggagcctcctgaggcatctttaacgtgacagagcctcattctgccttgaagatgccgatactgtgcagcattctttctggcgccctgctgctgtccttgctgcttcatgcctccatggtaagtgcgtgtctgatgcctgtagagcatacagtgtcatgacctcaccacttaaagtaacctgctgtcgagcatcctgacctgcaagcccgacctctcctacgagacacctgtgtttccctgcaacggcgacgagcagcccttgactgagaaccccctgtaagtactttatgggccatttccgctggtaccgc

SEQ ID NO: 13795 - DNA, 417 bp, Bos taurus
  Clone ID: 59-LIB3057-018-Q1-K1-G4
cggacgcgtggggtagttaaaaggggaaggcttcattgcattctttggcttaagcctgagggtggttactggtttgtaagatcataatatctaaatgtttgaggtctttgttttcctcttaaaactcttcatggagagagaagggattgtttctcaggggtactagatagagtgtttatatgtttctcatacatgtttgttgatattgtaactttatttattacttttaatatctttacttcttattagataattttgttcttattcaattttttttttttttttttttattatttttttgtctgtgtttgtttttttatttttttttatgtattattttgtttttttttttttttttatttttttttcattttattttttttatttttttttattctattctttttttctcttttt

SEQ ID NO: 13796 - DNA, 439 bp, Bos taurus
  Clone ID: 59-LIB3057-020-Q1-K1-G4
gaacgaagggaagaaaagtgaccgagaggccgctgaacatcctcgccccggcgcagcgggagccgcccgaggcagcttccccgtgacaggggtcccactcatcttgtttgcctctgcagagcctcagcctgcctggaagatgccgagactgtgcagcagtcgttcgggcgccctgctgctggccttgctgcttcaggcctccatggaagtgcgtggttggtgcctggagagcagccagtgtcaggacctcaccacggaaagtaacctgctggcgtgcatccgggcctgcaagcccgacctctccgccgagacgccggtgttccccggcaacggcgatgagcagccgctgactgagaacccccggaagtacgtcatgggccatttccgctgggaccgcttcggccgtcggaatggtagcagcagcagcggagttgggggc

SEQ ID NO: 13797 - DNA, 346 bp, Bos taurus
  Clone ID: 59-LIB3057-021-Q1-K1-G4
gggaggctgcgggcgaagcgcgcgtcgttcggttgagcggcgctgcttgtggagatccgcggaggccgaccggattcgttggctgcccgccagctccggccttctcagacccctgaggggggtcccctgccaagcccagcaccaatggcactgcagtggttgggggctttgacacggaggccgacgagttctctgacttcgaccgcctgcgcacggccctgccggcctctgggagcagcacaggggagctggagctgcttgcccgagaggtgccccgccgcagccctggcgccttcgacatgaccggggtcgggggctctctggctgaagctgtggggaagccccc

SEQ ID NO: 13798 - DNA, 167 bp, Bos taurus
  Clone ID: 59-LIB3057-022-Q1-K1-G12
taaacatttaatcaatataaaaaactaacatatcatatatattaaaataattaccctacacatatttatattaaaaagtatacagcattcacattcctattttaatacattagtattgcttaaatgttccataaaacaatacaactttccctttacttaatgaaaaa

SEQ ID NO: 13799 - DNA, 306 bp, Bos taurus
  Clone ID: 59-LIB3057-023-Q1-K1-G4
cggacgcgtgggcggacgcgtggggccgttttgagaggagcgtggccttctcctctccgcgccatggcgtgtgctcgtccactgatatcagtgtactccgaaaagggggagtcctctggcaaaaatgtcactttgcctgctgtgttcaaggctcccattcgacccgatattgttaactttgttcacaccaacttgcgcaaaaacaacatacagtcctatgctgtcagtgaattagcaggtcatcaaaccagtgctgagtcttggggtaccggcagagctgtggctcgaatttccagtgttcgaggt

SEQ ID NO: 13800 - DNA, 244 bp, Bos taurus
  Clone ID: 59-LIB3057-024-Q1-K1-G12
tctagatcgctagcggccgaccttatcttctagatccatattttctttttacagggatgccaactccagctctatttaagatgcaacccattagaaccaaacatgcattacaaaactctaaagctcacataagactgcacagaatggatccataagaaccatcttaaaaatggattcgattaatatggccttaacaattattggtatatacaatcctgcaattaacgagctcaaagcaagtgtc

SEQ ID NO: 13801 - DNA, 301 bp, Bos taurus
  Clone ID: 59-LIB3057-024-Q1-K1-G4
gagatatttatgccagtttctacaactctggtttgctcgacacctttataggagaagtgaaagagtatatttttgtgtccaacatagataatctgggtgccacagtggatctttatattcttaatcatctcatgaacccacccaatggaaaaccttgtgaatttgtcatggaagtcacaaataaaacccgtgcggatgtaaagggtggtacactcactcaatatgaaggcaaactgagacttgtggaaattgctcaagttccaaaagctcattttgatgatttcaaatctttatcaaaatt

SEQ ID NO: 13802 - DNA, 365 bp, Bos taurus
  unsure (317): unsure at all n locations; Clone ID: 59-LIB3057-025-Q1-K1-G4
gcgtcccgagcatcaaccctgatgaggctgatgcatattgtgcaactgtccaagccaccattttggctggaaaccaatctgaaaatgttcaagaattgcttccggtggatggcaatacagtttcccttggaatttaaactgctagatgaatcaataacatgctaactaaggcctttcgatccatccgaagatgagggagggacctgcaaagaatatggtcaagcagaaagccgtgctcatttcacgttatgaaggtgagcgtgccatgaccaaggataacaacctgcttggcaagtttgaactcacgggcatacctnctgccccccgtggtgttcctcagattgaagtcacttttgatattgatg

SEQ ID NO: 13803 - DNA, 259 bp, Bos taurus
  Clone ID: 59-LIB3058-001-Q1-K1-G4
attttcacagttgcagcttttcggctggtatgcataattgataattgcatctgtagggcagattgtgactagagatggacggtcagaagaaaaattggaaggacaaggttgttgacctcctctactggagagacattaagaagactggagtggtgtttggtgccagctcgttcctgctgctctcgctgacagtattcagcattgtgagtgtaacggcctacatttgcctggccctgttctctgtgactatcaactttag

SEQ ID NO: 13804 - DNA, 424 bp, Bos taurus
  unsure (124),(133): unsure at all n locations; Clone ID: 59-LIB3058-002-Q1-K1-G12
aaaggattcagcacgccgcccgttgggaagggagcttcgaggcggcccgccgcggcgcgtcggccgggcgggctgagccaatggcacgggcccttggggcgcgaacgccctaacgtgggtcggngcgggcggngagcagaggcgccggttgctagcttggattctgacttagaggcgttcagtcataatccggcacacggtagctttgcgccactggcttttcaaccaagcgcgatgaccaattgtgtgaatcaaccgttgctcttgtactagggtgaattactatttcggggcggtgattaatcccgtaaaacttgaggggacttcaactccattgtgaaatagttctcttcatatttcatagctacatttcaacaatgctgaactttctactttgatttttagatacttatttttcaacctt

SEQ ID NO: 13805 - DNA, 451 bp, Bos taurus
  Clone ID: 59-LIB3058-004-Q1-K1-G4
ggcagcagctgcagcgcctctcgtcttgtaggctctcctagctatcgccttttcgcttccggaaacatggcctccggtgtggctgtctctgatggggtcatcaaagtgttcaacgacatgaaagtgcgtaagtcgtcgacaccagaggaagtgaagaagcgcaagaaggcggtgctcttctgcctgagtgaggacaagaagaacatcatcctggaggagggcaaggagatcctggtgggtgacgtgggccagacggtagacgacccctatgccacctttgtcaagatgctgccagacaaggactgccgctacgccctctacgatgcaacctacgagaccaaggagagcaagaaggaggacctggtgttcatcttctgggcccctgagtgtgcaccccttaagagcaaaatgatctatgccagctccaaggacgccatcaagaagaagctga

SEQ ID NO: 13806 - DNA, 290 bp, Bos taurus
  Clone ID: 59-LIB3058-005-Q1-K1-G4
ctgtgttgagcgacttctgaaaacgggctatgaaccgatttatctcacagaacctgtggtcgaatactgcattcaagctctttccgaattcgaccggaacaggttacagaatgtggccaaagaaggcgtgacgtttgatgaacgtgagaaaagtgttgacagtcttgaagcactggccaaagaatttgagcctatgctgaactggatgaatgatgaagccctcaacgacaagagcgacaaggctgtggtgtatgaacgcctgtcagagtctccgtgagctctggcagcca

SEQ ID NO: 13807 - DNA, 420 bp, Bos taurus
  unsure (33): unsure at all n locations; Clone ID: 59-LIB3058-006-Q1-K1-G12
cttgcccaaggaaaagctcaaagaactcatttntgaagagactgctagattccagccgggataccgatcttaaatttgtcaggacacgggccgagcacggcacgcagaccccgcggctctcctgcagctcccgacccgaccgtaccctaccgtctgcgtgtccacctgactcctctgagccgtcggaagggcggctcctggtggttgtggcttctgtgctttcaaagaactccctcctgccagagcgctgttctggccccgtgcgcgtcgcctctggtggcctgcggctgtgcgtccctcagggctcctaccgcccaccttgcttcagtcactagccgccttctgctctgagagacgcagtggccccttcccttctgagtcctgccccggtgccctgccggtcgcgtcccctgggcgctt

SEQ ID NO: 13808 - DNA, 357 bp, Bos taurus
  Clone ID: 59-LIB3058-007-Q1-K1-G12
ctagatcgcgagcggccgccctttttttttttttttttttttttttttttttttttgaatatcagactttatttttccctgaaaagacatcatttggtcaaataaaccactaagtattaagcatggacagctgttgttagagtagcagattcagttttttgatatatcttaattgtgcactttgggaattttaatttaaagaaagcaactgagattaaaaatcttgcgggcagctgtatctattaatgagccttatcccatttcctggtgttttaaaagaagaaacactgccttgattatatgaatacactcagaaagtacatttagcttgtagtattgaattctcttaaaggaatg

SEQ ID NO: 13809 - DNA, 435 bp, Bos taurus
  Clone ID: 59-LIB3058-007-Q1-K1-G4
ggaaaaaaaattttcctatgagggtagaaaagaattatgaggtacaatagatgagtaggtctaagtctctcctttaaaaaagtgtcttttttactatcttcatgtgatgtaccttttataagggcatgaaatcttaaataaaattttgtaaagaatctccaaatgatattttacatgtttcaatgtcattctcccaaatcttcccaccctctccctctcccacagagtccataagactgttctatatatcagtgtctcttttgctgtctcgtacacagggttattgttaccatctttctaaattccatatatatgcgttagtatactgtatttatgtttttccttttggcttacttcactctgtataataggctccagtttcatccacctcattagaactgattcaaatgtattctttttcatggctgagtaata

SEQ ID NO: 13810 - DNA, 231 bp, Bos taurus
  Clone ID: 59-LIB3058-009-Q1-K1-G12
gcgagcggccggcctccctgtacctgttacatcttctttactacttcacgacagaaggtacgggctcaattactatggtgtaccattgcatgtctatgctctactctctttacatgccagcctgcatgctctaggtacacattggatcagccgattaccgtgatcggatgcctcgtgtcgcatcgtaagcttgtcctacatgttcgagcactggtgctagaactgtgctgt

SEQ ID NO: 13811 - DNA, 423 bp, Bos taurus
  Clone ID: 59-LIB3058-010-Q1-K1-G12
gccacacttccgtcctcatgccaccccatctgggcaggccacccactcacccctcatgagctccatgtgctttcagcttcaccagagtgggtggggggtccatgggcatcaacctggggaccctccatttcaccaaagcctccccctcagcccttggggagaatgaatggctaatccactgacccccagcatcatcatgaggctgtggactggcaggggtcaaagggaagagacactgggggtgcaaaaggagactcgagacatccaaggaagtcccaagcagagcttatagcctgaagcctacttaaactgtgttatgtgcaataactgagcttagagttaagaattgtgttcaagtgcttggatttccgtctgtatatttaagtgctgaaactgtatctctcagtaattttagatgtcttt

SEQ ID NO: 13812 - DNA, 405 bp, Bos taurus
  Clone ID: 59-LIB3058-012-Q1-K1-G4
cggagcaacgccaagcagatcgtgtcagagatgctgcggtacctggaaacggccgactacgccattcgtgaagagattgtcctgaaggtggccatcctggctgagaagtacgccgtggactacagctggtacgtggacaccatcctgaacctcatccgcatcgcgggcgactacgtgagcgaggaggtgtggtaccgcgtgctgcagatcgtcaccaaccgcgacgacgtgcagggctacgctgccaagaccgtcttcgaggcgctccaggcgcccgcctgccatgagaacatggtgaaggtcggcggctacatccttggggagtttggaaacctgattgctggggacccccgctccagccccccggtgcagttctccctgctgcattccaagttccacctgtgc

SEQ ID NO: 13813 - DNA, 296 bp, Bos taurus
  Clone ID: 59-LIB3058-013-Q1-K1-G4
ataaaactcacagaatgggagagagatttgtaaatcatgtgtcgtgtctcataagattctaggttccagaatatataaaagattcttgcaactcaacagtaaaaagacagcccaatcaaaaaatgagtcaaaaatctgaatagacatgtcttcaaagaagaaatacctaagggcagtatgtacgtgaaagaaatgttcatcattaggcataagggaagtgcaaattaaaatcacagtgagatactatttcatacccactgaatcgttgtaatcaaaaagactgataataggatttc

SEQ ID NO: 13814 - DNA, 417 bp, Bos taurus
  Clone ID: 59-LIB3058-015-Q1-K1-G12
cgcgagcggccgccctttttttttttttttgaagaagagatggttaaaacccagtttattagaccagaggcatgcgtcacctatagccctgcctgctgttccccatccactgcacaccctttggccttgctcctgcttccctctggagaggtttgatctctaaggaactcctgggaaccaagagttgccaaagatcctatggcctcactctccagctccaggcgaatgcacagatgacctgccacaggtcttgttctggggttggaggctatgaggcagctggacagaaaaagcctgggaaagggcaaggctctggcctgggaagaaggccctgatggaaggggcatggcaagtcctctatctcgctggtttctcattaaaggaagaaaggaagaacagaatagcagagctttcaat

SEQ ID NO: 13815 - DNA, 451 bp, Bos taurus
  unsure (440): unsure at all n locations; Clone ID: 59-LIB3058-015-Q1-K1-G4
gtgaatgttgttttgtgtcatccatcagcccaacgatactacgtgtcttctgttttttctgggtctccttctttccaaaggctatatatagtggtcatttggtggctctaactttttatgtaagatgtcttgggtttcattttaccttttctcttttcaatggtgtttgctgaatgataacaaattaggaatgctcaatgtgctgttgattctttcagtacacagtattgttcttgtaaaactgtgacattccacagagctactgccacggtcctttctttgggtgtcaggctctgaaactcaaaatttgctgtctttggtttctcatggctgtcatctgtctttatgatttcatgattagacaacgtggaattacctaacaggcattgcactcaaagtgatgtgatttatgcatttatgcatgagaactaaatagattnttagattccta

SEQ ID NO: 13816 - DNA, 430 bp, Bos taurus
  Clone ID: 59-LIB3058-017-Q1-K1-G4
gataaacttattaaggaaggagatattgtgaagagaactggggctattgtagatgttccagtcggcgaggagctgctgggtcgtgtagttgatgcccttggtaatgccattgatggaaagggtccaattggttccaaggcccgaagacgagttggcttgaaagcccctgggatcattcctcgaatctctgtgagggaaccaatgcaaactggcattaaggctgtggatagcttggtgccgattggtcgtggtcagcgtgagctgattattggtgaccgacagactggcaaaacgtcaattgcaattgacacaatcattaaccagaaacgattcaatgatggaactgatgaaaagaagaagctgtactgtatctatggtgctattggtcaaaagagatccactgttgcccaattggtgaagagacttacag

SEQ ID NO: 13817 - DNA, 426 bp, Bos taurus
  Clone ID: 59-LIB3058-019-Q1-K1-G12
ctagatcgcgagcggccgcccttttttttttttttttttttttttttttttttttttggtttttttttttttttttttttttttttttttttttttccaggttaaatccccttaattcttaaaatttttggttcataactcgttaaaacccttgcccctaatcctccacctttccttctttttttttttaaactttttttttttttttttgcacccctttgcaactttggggacctttgacccagctttaattttcctttatcccttttttatccggggaaactttggagagcaaaacccgcttttaaaaacccaaatcaaagggtccccctaagacctaaacttacggttttgccccatttaaaatcaaccccaaactcccccccaaaggccctggggtttaaaatggcccagccccttttacct

SEQ ID NO: 13818 - DNA, 474 bp, Bos taurus
  unsure (434): unsure at all n locations; Clone ID: 59-LIB3058-019-Q1-K1-G4
cggacgcgtgggcgcggggggagggctatgccaagcccaacgaaggtgctctcgtggaggttgcactggaaggatacttcaaggaccaggtgtttgaccggcgggagctccgctttgaggtcggcgagggggagagcatggatctgccctgtgggctggagaaagccatccagcgcatggaaaaaggagaacattccattgtgtatctcaagcccagatatgctttcggcagtgctgggaaggagaagttccagatcccaccaaatgctgagctgaagtatgaaatacatctcaagagttttgagaaggccaaggagtcctgtgagatgagttcagaggagaagctggagcagagcaccatagtgaaggagcgaggcactgtgtacttcaaggaaagcaagtacaagcaagctgtgctgcagtacaagaagatngtgtcctggctggaatacgagtccagcttctctgatgagg

SEQ ID NO: 13819 - DNA, 323 bp, Bos taurus
  Clone ID: 59-LIB3058-020-Q1-K1-G4
gctttgtggctgtggggcccagggacatcccgttggcccctcggcctggccccaatggctcctccctgccgccccaggtcggccacttcactggcttcaacagcagcaccctgaaggctaatctggatgccggctacgccaaggactacaccacgggggccatgatgacctttgccagcgtctttgctgttctttttaacggctgcacgggcatcatggctggggccaacatgtcaggggagctgaaagaccccagccgggccattcctctgggcacgattgttgctgttgcctatactttcttcatctacatcctgcttttc

SEQ ID NO: 13820 - DNA, 174 bp, Bos taurus
  Clone ID: 59-LIB3058-023-Q1-K1-G12
cgtgcctgaggtggggcccgaccgcctggagaagctgaaaaatgtcatacatgagatcttctacaagtttgggaaaatcacaaacgatttctatccagaggaggacggaaggacaaaagggtatattttcctggaattcgcatcctctgcccaagcgttggacgcccgggaaaa

SEQ ID NO: 13821 - DNA, 416 bp, Bos taurus
  Clone ID: 59-LIB3058-025-Q1-K1-G12
caaccaggcattattttaaaagatttgcttccatatcaattctgttgccttgctctgaggtttggtcttcccgggctctcagccagagaccagcaagtgttgggaagcacttggtacccagactaagctactgtaggagtgcacacgtggcagctcccattatgcctcctgttttacatggaaaatgttcatcgaaaggcaacagcccccagtagtaccagcagtgtagtgacctcagactctcaaactcgccactagaccgtggctgccagattgtatgtgttactatgccaggggccccatggccccactgctactgttggtgcctctgtcagctacactgtctgtctacctaacactaggctctgctcagaaaacatatatcctgcgttcaggagagagatgatgcagaatgc

SEQ ID NO: 13822 - DNA, 455 bp, Bos taurus
  unsure (387): unsure at all n locations; Clone ID: 59-LIB3058-025-Q1-K1-G4
gtccgcccacgcgtgcggccggattgctctgactgggctgactgtaaccgagtacttcagagaccaagaaggtcaagatgtgttgctgtttattgataacatctttcgcttcacccaggctggctcagaggtgtctgctttattgggcagaatcccttctgctgtgggttatcagcctaccctggccactgacatgggtaccatgcaggaaagaatcaccaccaccaaaaagggatctatcacctctgtacaggctatctatgtgcctgctgatgacttgacggatcctgccccggccactacctttgcccatttggatgctaccactgtgttgtcccgtgctattgctgagctgggcatctatccagctgtggatcctttggactncacgtcttgcatcatggatcccaacattgttggcagtgagcattatgatgttgccccgtggggtgcaa

SEQ ID NO: 13823 - DNA, 342 bp, Bos taurus
  Clone ID: 59-LIB3058-027-Q1-K1-G4
caaaatttgtaacggttggctaaataccttggcccaaagcattgcaattggtccttttgaaggtcagatccaccgtttggggaattcataaactctcacccttcaagatagtccttgactgccctatgtatttggttcctgcttttatttcatccataactgatcaaaggagacatattctagtattacaaaggacttcttgtttctattaaaaataaccatattttggtaaagcagtcatttcacagtgtgccctttggagaaaaagacttgtaacttatagattttgtctactggaaaagatactgccaaaagcattttcctcagactcaccagaaagac

SEQ ID NO: 13824 - DNA, 440 bp, Bos taurus
  unsure (426): unsure at all n locations; Clone ID: 59-LIB3058-029-Q1-K1-G4
ggacaactccgggaaggaggcggaggcgatggcgctgctggccgaggcggagcgcagagtgaagaactcgcagtccttcttctcgggcctcttcggaggctcgtccaaaatagaggaagcatgtgaaatctacgccagagcagcgaacatgttcaaaatggccaaaaactggagtgctgccggaagcgctttctgccaggcggcccagctgcacctgcagctgcagagcaagcacgacgcagccacctgcttcgtggacgccggcaacgcgttcaagaaagccgacccccaagaggccatcaactgcttgatgcgagcgattgagatctacacagacatgggccgcttcaccatcgcggccaagcaccacatctccatcgccgagatctacgagacggagctggtggacattgagaaggccatcgnccactacgagcagt

SEQ ID NO: 13825 - DNA, 289 bp, Bos taurus
  Clone ID: 59-LIB3058-030-Q1-K1-G4
cggatgtcatcgtcacggagaacgagaagacagctgagttcttcctccagcatgtggacagtgcctgtgtgttctggaatgccagcactcgcttctctgatggctaccgcttcggactgggagctgaagtgggaataagtacatctcgaatccacgcccggaggccagtgggactagaaggactactgactaccaagtggctgcttcgagggcaggaccacgtggtctcggacttctcagagcacggaagtttaaaggaccttcatgagaacctccctatttctcagcg

SEQ ID NO: 13826 - DNA, 265 bp, Bos taurus
  Clone ID: 59-LIB3058-031-Q1-K1-G4
ctcgactgagcattcactgctccaccattactgacgtgcggacaaccacagccctggagatgcctgaccgggagaacacctttgtggttaaggtggaaggcccctcggagtacattctggagacagctgatgcgctacatgtgaaggcctgggtgtctgacatccaagaatgcctgagcccgggaccctaccctgctaccagtccccgccccatgacccttctcctggcccctgggaccttctttctgacaagggagaacacata

SEQ ID NO: 13827 - DNA, 399 bp, Bos taurus
  unsure (346): unsure at all n locations; Clone ID: 59-LIB3058-036-Q1-K1-G4
cgacccacgcgtccgcgggcgcttgtttggctcggacagggttgcgcctcaacggggctcaagcaaggatggacaccgtgcggccagaaccacccactatggctccctgccccagaaggcgcagcacggccggccccaagacgaaaaccccgtagggcacttcttcaagaacatcgtgacaccccgcacacctcctccatcgcaaggaaaggggcgaggactgtccctcagcagatttagctggggggctgagggccagaagccaggattcggctatggaggcagagcgtctgactacaaatcggctcacaagggactcaaggggcacgacgcccagggcacgctntccaaaatcttcaagctgggaggacgagacagccgtttcgggtccccgatggc

SEQ ID NO: 13828 - DNA, 403 bp, Bos taurus
  Clone ID: 59-LIB3058-038-Q1-K1-G4
ctagatcgcgagcggccgcccttttttcttttttttcttatcctctcatcattgaggctgatggttaatagacattatagtaaacccacgcgaaatattcagaattagaaggggattaaagagccacgtttgggcgttacgttgactattcctcattttcatcctaaggggggttgtgacgccagtgtggggacttcgtgggggtctggtggaagagatgctgaaatcaaaaggtgggaatcagtaggttatgggggaagcacgggagatgtcagctggggttagaaaagagtgggatagaggacccctccccgtcctcactggggccggcacccagtccggcagcgattcgggaaaagcgagtgtactggtcaatgggtttctgggaggaagcaggtggggt

SEQ ID NO: 13829 - DNA, 378 bp, Bos taurus
  unsure (81): unsure at all n locations; Clone ID: 59-LIB3058-040-Q1-K1-G4
ggttaagccgactcgacccacgcgttcgcggacgcgtgggctttttcgcgtcggttgcatacactccccactaccggcgtnctctgcctgctccgtccgcttcgttttctcccgacgccggcatcatgaaggtcgccagtggcagtgccgcggccgccgcgggccccagctgcgcgctgaaggccggcaaggcggcgggcggcgcgggcgaggtggtgcgctgcctgtccgagcagagcgtggccatctcgcgctgcgcgggcggccccggggcgcgcctgccggccctgctggaggagcagccggtgaacgtgctactctacgacatgaacggctgctactcgcgcctcaaggagctggtgcccaccctgccccaga

SEQ ID NO: 13830 - DNA, 143 bp, Bos taurus
  Clone ID: 59-LIB3058-041-Q1-K1-G4
gcaagcgccaccagtgccacatgcgagcctacgatcccaaggggggcctggacaacgcccggcgcctaactgggttccacgaaacctacaacatcaacgacttctctgccggcgtgggcaaccgtggcgctagcatgcgcatt

SEQ ID NO: 13831 - DNA, 404 bp, Bos taurus
  unsure (373): unsure at all n locations; Clone ID: 59-LIB3058-042-Q1-K1-G4
ggaaaaccatcatccccttgatctccttttgcacccccaaggtggaatttccccaggaccagctgaccaccctcaccggtcggatccaggaagctggcacagaggtggtcaaggcgaaggccggagcgggctctgccaccctgtccatggcatacgctggagcccgctttgtcttctccctcgtggacgcgatgaatggaaaggaaggagtcgtcgaatgttccttcgttaagtcccaagaaacggactgtccgtatttctccacaccgttgctgctggggaaaaagggcatcgagaagaatctaggcatcggcaaggtctcccctttcgaagagaagatgattgctgaggccatccctgagctgaaagcctncatcaagaaaggagaggagtttgtcaagaac

SEQ ID NO: 13832 - DNA, 419 bp, Bos taurus
  Clone ID: 59-LIB3058-043-Q1-K1-G12
ggtttttcctgtggtcatgtatggatgttagagttggactgtgaagaaggctgagtgccgaagaattgatgcttttgaactgtggtgttggagaagactcttgagagtcccttggactgcaaggagatccaaccagtccattctgaaggagatcagccctgggatttctttggaaggaatgatgctgaagctgaaattccagtactttggccacctcatgcgaagagttgacttattggaaaagactctgatgctgggagggatccggggcaggaggagaaggggacgacagaggatgagatggctggatggcatcaccgacctgatagacgtgagtctgagtgaactccgggagttggtgatggaaagggaggcctggcgtgctgcgattcatggggtcgcaaaaagttggacacgac

SEQ ID NO: 13833 - DNA, 380 bp, Bos taurus
  Clone ID: 59-LIB3058-043-Q1-K1-G4
cccacgcgtccgcggactcgtaggcggtcgcgtgggtgcttacttatcctgcgcagctgccccttggagacgcgtgacaaggagtgccatccaccatggtgaagctgaactgcagcttctacgcaaagacaggctctgctgattgtggtaccatagacagtacttgataactcaccttctgtgatgtgaattagctgcagtcaaatattgaagactagctaatcatgtgtacgcaaacatgtaaattgaatttaatgttgaatactttcaagcattcacctaacaaagccctcattaaacattgctatgctcaaagggtgcagtgtctttgatagctaactctaattaaaaattgtagatgagtgtataaaatatttgtg

SEQ ID NO: 13834 - DNA, 410 bp, Bos taurus
  unsure (402): unsure at all n locations; Clone ID: 59-LIB3058-044-Q1-K1-G4
atgaaattaaaagatgcttactccttgttaggaaagttatgaccaacctagatagcatattcaaaagcagagacattactttgccaacaaaggtccgtctagtcaaggctatggtttttccagtagtcatgtacggatgtgagagttggactgtgaagaaagctgagcaccaaagaattgatgcttttgaactgtggtgttggagaagactcttgagagtcccttggactgcaaggagatccaaccagtctattctaaaggagatcagtcctgttctttggaaggactgaagctaaagctgaaactcaaattctttggccacctgacatgaagagttgactcattggaaaagactttgatgcttggaaagactgaaggctggaagagaaagggatgacagangatgagat

SEQ ID NO: 13835 - DNA, 426 bp, Bos taurus
  Clone ID: 59-LIB3058-045-Q1-K1-G12
gagcgaggcctgaagcattactggtttttgtcctggcccgtccagaagaccccagaccgtgcgcctccactcctgcacctggtgcgggaggtggaggaggcggcccagcaggaggggccccactgcgcccccatcgtggtgcactgcagcgcagggattgggaggaccggctgcttcatcgccaccagcatctgctgccagcagctgcggcaggagggcgtggtggacatcctgaagaccacatgccagctccgtcaggacaggggcggtatgatccagacgtgcgagcagtaccagttcgtgcaccacgtcatgagcctctacgagaagcagctgtcccgccagtccccggagtgaccacacaccctcccgaggtcctctggtacctcccagcctgagtcggggcccttcttgcagccacaccca

SEQ ID NO: 13836 - DNA, 372 bp, Bos taurus
  Clone ID: 59-LIB3058-045-Q1-K1-G4
cacatgagccttgatgtcattgggcacggagattcacggaagcataccacgactggccatctgatctataaaggaggcggcatctacaagagatcaattgacaagtatgagaatgaagctgccgagatggaaaagggctccttcaatacgcctgagtcttgtacaaacttatagctgatcgtgaacgtgagatcaccatggatatctgcctgtggaaatttgagaccagcaagtactatgttaccatcattgatgccccaggacacagagacttcatcaaaaacatgattacaggcacatcctaggctgactgtgctgtcctgatcggtgctgctggtgttggtgaaatttgaagccggtatctccaagaac

SEQ ID NO: 13837 - DNA, 436 bp, Bos taurus
  unsure (38): unsure at all n locations; Clone ID: 59-LIB3058-047-Q1-K1-G4
tcgcggcaccatggggtccagcaacttggatctgtttnttgacagcgtggggcacttcgggagagaccaaatattcctctatttcatatgtgccttccagaatatctcttgtggtatccactacttggcttctgtgttcttgtcagtgtccccccagcatacctgtaggcccccaggcaatgtgagtcatgttcttttccaagacctctctacttggcagttggaggacatctggacccagttctccgtaggccgtgaggatcgcattctcgtgcagctgcaagatggggagatctgggagcttaccagctgtcagaggttccggagggatgaccagtcgagcctggactatgagtacagcggccagaagagcagcttcccttgcttggatggctacatctacgacagaagcaagtggctcagcactgtggtgacc

SEQ ID NO: 13838 - DNA, 385 bp, Bos taurus
  Clone ID: 59-LIB3058-048-Q1-K1-G4
cggacgcgtgggcgcgtccgccccgcttcacaggcctctcgccttcgccgctccgccttcgccgccggtcgacaccgcaaccagttcgccatggatgatgatattgctgcgctcgtggtcgacaacggctccggcatgtgcaaggccggcttcgcgggcgacgatgctccccgggccgtcttcccgtccatcgtggggcgcccccggcaccagggcgtaatggtgggcatgggccagaaggactcgtacgtgggggatgaggctcagagcaagagaggcatcctgaccctcaagtaccccattgagcacggcatcgtcaccaactgggacgacatggagaagatctggcaccacaccttctacaacgagctccgtgtggcccctg

SEQ ID NO: 13839 - DNA, 361 bp, Bos taurus
  unsure (302): unsure at all n locations; Clone ID: 59-LIB3058-052-Q1-K1-G4
gtccaggagtaaaatcagaaatgcatcaggtgtctttatggtttaaattgtgtctttaggtaatgcactgaggaaaaacaaataaaaagcagatagaaaggacatgaagtaaaaataatgtggaaagtcacagttggtgcctgtgggtcagcttgtgacggatgaggagattgaggttaaaactgaggacagggacttccctagtggtccatggctgggactctgtgctcccaatgcagggagcccagggttcaattcctggtcggggaactagatcccacatgctgcaatttaagatcctncatgccacacctaaaacctagcacaggcaaaaaaacaaaactgaagccagacctcgttt

SEQ ID NO: 13840 - DNA, 381 bp, Bos taurus
  Clone ID: 59-LIB3058-057-Q1-K1-G12
aaagactgagaatcagacttctgcattcagtgggattctcccgacagaaccacactttgctgggtctctgggatttggggcaggggagcagggggctcagggcaggtcacagctctgtcctggagatggccatacccaagcacctgtaccttctgttctgtctgtagaatgaatgttatgatggatgtttttttttttgcggttattgtttttttttattttttttttatatttttttttttatttttttttctatgtctttttatttttattttttttttttttattttttattttttctttgtttttttttttcttattctttatttttaattttttttttttttttttttttgttttttatatttttttgtttttttt

SEQ ID NO: 13841 - DNA, 380 bp, Bos taurus
  Clone ID: 59-LIB3058-058-Q1-K1-G4
agtggcgtttagtacattcccaatgttgtacatccaaaacctctgtccagttctaaaacattgtcactaccacagaataaaaccattatacagttagttcccattcctgcctcccctggcaatcaccagttttctttctgtctttctggatttacatattctggatatttcatatacatggagtcacacagtgatttttctgttttctttcacttgtaatagtgtttctgaggttcatggatataccatgtatcaatgttccattacttttttatgactgaacaatattccattgtccgtgtataccacaatttattgatacattcatccgttgaaagacatttaggttgtttccaccttttggctactgtgcatattac

SEQ ID NO: 13842 - DNA, 405 bp, Bos taurus
  unsure (365): unsure at all n locations; Clone ID: 59-LIB34-001-Q1-E1-G12
aagccacacgttagcctccagcaacaccgacttcgccttcagcctctacaagcagttggctttgaagaaccccaataagaatgtcatcttatccccgctgagtgtctccatagccttggccttcctgtctctgggggcccgtggctccaccctgacagagatcctggaaggtctcaagttcaacctcacagagatccaggagaaagaaatacaccatagctttcagcacctcctgcaggcgctcaatcaacccagcaaccagctgcagctgagcgtgggcaacgccatgttcgtgcaggaggagctgaagctgctggacaagttcatagaagatgcccaggtgctgtactcctctgaggccttcncgaccaacttcaaggattctgaagctgccaggagtctaat

SEQ ID NO: 13843 - DNA, 358 bp, Bos taurus
  Clone ID: 59-LIB34-001-Q1-E1-G4
ggtcgcccacgcgtccgctgacttgtgtccattggaaccatctttggcagtcaatgttagatttcgaaagatgacccttctgagaaggacgctctgcagccaggccggaacctggtggctgctggctatgcgctctatggcagtgccactatgttggtcctggccatggcgaatggagtcaactgcttcatgctggacccggccattggagagttcattttggtggacagggatgtgaagatcaaaaagaaagggagcatctatagcctcaatgaaggctatgcgaaggactttgatcctgccctcaccgagtatgtccagaggaagaagttccccccagacaactcagcccccctat

SEQ ID NO: 13844 - DNA, 425 bp, Bos taurus
  unsure (403): unsure at all n locations; Clone ID: 59-LIB34-002-Q1-E1-G12
acgcgtcaacataactgcagctggtaacctgttgaaggacaacgccaccgagcaagagatcctcatgtacttggagaggacctgtgactggctccctaagccgaacatgtctgcctcctgcaaggagatcgtcgactcatacctcccagtcatcctggacatgattaaaggacagatgagccatcccggggaggtgtgctccgctctcaacctgtgtgagtctcttcagaagcacctggcggagctgaatcaccagaaacaactcgagtccaatcagatcccggagctggatatggctgacgtggtggctcccttcatggccaacatccccttcctcctgtaccctcaggacggctcccacagcaagccccagcccaagaacgctaatgggaacgtctgccangactgcattcagctggtaaccg

SEQ ID NO: 13845 - DNA, 426 bp, Bos taurus
  Clone ID: 59-LIB34-002-Q1-E1-G4
gacccacgcgtccgataatatcccaactaagcttcgtgtgctccgttcaattctggagaatttgagaagcaaaatacaaaaattagaatcggatgtctcaactcagatggaatactgccgcaccccgtgtactgttacttgcaatattcctgtggtgtctggcaaagaatgtgaggaaatcatcaggaatggaggtgaaacatctgaaatgtacctcattcagcctgaggattctagcaaaccatatagagtatactgtgatatgaaaacggaaaaaggaggatggacagtaattcagaaccgtcaagatggtagtgttgactttggcaggaaatgggatccatataaacaaggatttggaaatattgcaaccaatgcagaatggaagaaatactgtggtgtaccaggttagtattggctcggaaa

SEQ ID NO: 13846 - DNA, 394 bp, Bos taurus
  Clone ID: 59-LIB34-003-Q1-E1-G12
gctcctctgacacttttagtcggttacaccaagagttatctctctatggtagggtcctgctgtacttcaccaaacccaacagtatgctttttgaaagagagacttcagcttaaacatttttcacttctcaccattatgacaaacagaatctgctcacaatacgctgcttatgggaaggagaagtcaaggctcagccatctcatcaaatttgcccagaaagtgcctactgcacatctggaagatgttctgccacttgctgaagatattacaacaatcctctccaagtgctgtgactctgtctctgaggactgcatcaaggagcttcctgaatatgcagtaaaactctgtgacaacttatccactaaaaattcgaaatttaaggactgttgtcaag

SEQ ID NO: 13847 - DNA, 390 bp, Bos taurus
  Clone ID: 59-LIB34-005-Q1-E1-G4
gaagggaaaagatgcttctgggaacaaggttaaagctgagccaaccaaaatagaagccttccgagcttcactttctaagctaggggatgtttatgtcaatgatgcttttggcactgctcaccgagcccacagctccatggtaggagtaaatctgccaaagaaggctggaggttttttgatgaagaaggagttgaactactttgccaaggccttggagagccctgagcgaccgttcctggccatcctgggcggagctaaagttgcagacaagatccagctgatcagtaatatgctggacaaagtcaatgaaatgattattggtggtggaatggcctttaccttccttaaggtgctcaacaacatggagattggcacttccttgtttgatga

SEQ ID NO: 13848 - DNA, 325 bp, Bos taurus
  Clone ID: 59-LIB34-006-Q1-E1-G4
aaaagaccatttcaaaagtgatttacttttttaaagaactttatctgaaaagaaaaagataatatttttcctatgggacaatggacttgcaaagcctcacttcactttaaaagtaaaaagaacccatgttgagaactccactaacagttttatgccggggaaaatttatccacataccatttcaataaataatttggttcctaaaaaaaaactggacgggcatcaaatgtccatccggtttgaatggcgctgggtcgatagtgcccctaaaatgtgaacgatacttagcccccaaaagaatttagaaaaggggggggtcccccaa

SEQ ID NO: 13849 - DNA, 346 bp, Bos taurus
  Clone ID: 59-LIB34-007-Q1-E1-G4
ggagcagggcgcgagtgctgaagctgcggctgcgcggcccagagcgaggagctgtccgagccgaggagatagaagtggttgcagcactcggtgcctggaagtggtacagtcatgtttgaaattaagaagatctgctgcatcggtgcaggctatgttggtggacccacgtgtagtgtcattgctcacatgtgccccgaaatcagggtgacggttgttgatatcaatgaatcaagaatcaatgcatggaactctcctacacttcctatttatgagccaggcctaaaagaagtggtagaatcctgtcgaggaaaaaatttatttttttctaccaatattgatgatgcca

SEQ ID NO: 13850 - DNA, 357 bp, Bos taurus
  Clone ID: 59-LIB34-008-Q1-E1-G12
cggacacgtgggttaagggtctggccccttctgcctggttcatttaaaactcttgaaatgaaggcatcaaaacctggctggtggctcctagacacggaagttggagaaattcagagagcagggatgcagacaccatttctcattgtagacagagaatgtaagatgccaatgggactaagcactggcctgatagctgactcacagatccaggcttctgagttttggggttattgggaacccaaattagcaaggttaaacaatggtggatcatacaatgcttggattgcagaaaaactttcaacggaatttaaccctgaaccttggatccaggtagacatgcaaaaggaagtcctgctc

SEQ ID NO: 13851 - DNA, 390 bp, Bos taurus
  Clone ID: 59-LIB34-009-Q1-E1-G12
caccaccacaggcacaagggtccccaaagacagggtcactcagataactgtgatacaccagtaggaagtgaaagtttacaaccttctcttccacaaaagaagctctgacgaaagagatgcataaatcagttactctgacagtttcccaaagattcagaatctgctttgagtagctgctgttgccactgtcgacatctggtatttgaaaaaacagggtctgcaatcacctgacagtgtacagaaaagctcccctctttgtgtagctgacagggccttttggcggaggagaatgtcattgaatcttgacagtgacgtttgcctccagctgcctgacaggcagcaggtcagcagctcaaccccacagaagccagcaccaagtgaagctgaaaa

SEQ ID NO: 13852 - DNA, 400 bp, Bos taurus
  Clone ID: 59-LIB34-009-Q1-E1-G4
ccgacgcgtccgagctgagactgtcacctgtgttccaggagcggaaccagcaatgtcgtcctcagccatgccagacgtacctgccccactcaccaatttgcagtttaaatatactaagatcttcataaacaatgaatggcatagttcagtgagtggtaagaaatttccagtctttaatcctgcaactgaggagaaactctgtgaggtggaagaaggagataaggaggatgttgacaaagcagtgaaggctgcaagacaagcttttcagattggctctccatggcgtactatggatgcttcagagagaggacggctgttaaacaagttggctgacttaattgaaagagatcatctgctcctggcgacaatggaggcaatgaatggtgggaaactatttttc

SEQ ID NO: 13853 - DNA, 358 bp, Bos taurus
  Clone ID: 59-LIB34-010-Q1-E2-G4
gagctggtcaccatcagcttcatctacgagaagaggcggaagccagacgaggtcctggatgatgaagacataggctctgctccattgaaaagcagtgggaaccccttgaatgacaaagacaaagacaagaatgttcgccagaggaactccagctgagaggaccaggatgagtctacaggcagcgcagagaacagccccacgctcttccctctctgaaaaccccccagcataagcagaccgtgttgtacattcagactacacattttgtctccttttttaaaaactgaagtatgattttctctgtgtagaattccgttccgtatgagccttgcctttcctgtctaaacatctcgtgagc

SEQ ID NO: 13854 - DNA, 416 bp, Bos taurus
  Clone ID: 59-LIB34-011-Q1-E1-G12
gggtccagccacgcgtccggcaaatgtccgcggcctccacagcagcgcagtggcagccacctacaaatatgtgaacctgcgggagccctcgatggacatgaagtcggtgactgaccgggcagcacagaccctgctgtggaccgagctcatccgaggcctgggcatgaccctgagctacctgttccgtgagcccgccaccatcaactacccgtttgagaagggcccgctgagtccgcgcttccgcggggagcacgcactgcgccgttacccgtccggggaggagcgctgcatcgcctgcaagctctgtgaggccgtctgcccggcccaggccatcaccatcgaggctgagccgcgggccgatggcagccgccggaccacgcgctatgacatcgacatgaccaagtgcatctactgcg

SEQ ID NO: 13855 - DNA, 396 bp, Bos taurus
  Clone ID: 59-LIB34-011-Q1-E1-G4
gacaacaatactttgtgtgatgagtttaaggcagatgaaaagaagttttggggaaaatacctatacgaaattgctagaagacatccctacttttatgcaccagaactcctttactatgctaataaatataatggagtttttcaagaatgctgccaagctgaagataaaggtgcctgcctgctaccaaagattgaaactatgagagaaaaagtactgacttcatctgccagacagagactcaggtgtgccagtattcaaaaatttggagaaagagctttaaaagcatggtcagtagctcgcctgagccagaaatttcccaaggctgagtttgtagaagttaccaagctagtgacagatctcacaaaagtccacaaggaatgctgccatggtgaccta

SEQ ID NO: 13856 - DNA, 402 bp, Bos taurus
  Clone ID: 59-LIB34-012-Q1-E1-G4
gggtccagccacgcgtccggacaaaatgactgacaatgatcttatcgatattcttgaccctttttatcatctttcaactaaaagtttcaaaacacaacttttatcacaatccagaactgacaccaacaaagatattaaaacaaaacaccccttgagaaacaaaatgaacgaaaatttatttacctcttttattacccctgtaattttaggtctccctctcgtaacccttatcgtactattcccaagcctactattcccaacatcaaaccgactagtaagcaatcgctttgtaaccctccaacagtgaatacttcaacttgtatcagaacagctaatgagtatccacaattctaaaggacaaacatgatcattaatattaatatctctgatcctagttattgg

SEQ ID NO: 13857 - DNA, 412 bp, Bos taurus
  Clone ID: 59-LIB34-013-Q1-E1-G12
gtcgacggacgcgtccgacatccgagacggtgaggcgagctgtcaggcctttagcccttcatccttggttaaggagatgaccaaccagtacagtattctcttcaaacaagagcaggcgcatgatgatgccatctggtcagttgcctgtgggtcaaacaagacagagaactctgagacagtggtcacgggatgcctgtatgacctggtgaaggtctggaaatggcgtgatgagaagctggacctacagtggactctggatggccatcaactgggtgtggtgtctgtggacatcagccacatcctgcccattgctgcatccagttctcatgatgctcatattcgtctctgggacttgggaaacgggaaacagattaagtctataaatgcatgacctgtggatgcctggactttg

SEQ ID NO: 13858 - DNA, 416 bp, Bos taurus
  Clone ID: 59-LIB34-013-Q1-E1-G4
accccacaaaactttggcacaatgaagtgggtgacttttacttctcttctccttctcttcagctctgcttattccaggggtgtgtttcgtcgagatacacacaagagtgagattgctcatcggtttaaagatttgggagaagaacattttaaaggcctggtactgattgccttttctcagtatctccagcagtgtccatttgatgagcatgtaaaattagtgaacgaactaactgagtttgcaaaaacatgtgttgctgatgagtcccatgccggctgtgaaaagtcacttcacactctctttggagatgaattgtgtaaagttgcatcccttcgtgaaacctatggtgacatggctgactgctgtgagaaacaagagcctgatagaaatgaatgcttccctgagcacaaagatga

SEQ ID NO: 13859 - DNA, 380 bp, Bos taurus
  Clone ID: 59-LIB34-014-Q1-E1-G4
aagctagcggctcaggcagagaagcagcaccatgaccggcaagaaagtctgcattgtaggctctggcaactggggctcagccatcgccaagattgtgggtggcaatgcagcccacctggaaaactttgacccacggttgacaagttggtttttgaaggaaacatccggggcactaaacctaaaaggattctccaacacacaccccgagattctcaaatccgtgccagggcacaatttgccccacaatgtggtggctgtccctgatgtggtcaaggctgcagcggatgccgacatcctgatctttgtggtgccccatcagttcatcggcaatatctgtgatcagctcaggggccacctgaaggccgacaccattggcgttt

SEQ ID NO: 13860 - DNA, 426 bp, Bos taurus
  Clone ID: 59-LIB34-016-Q1-E1-G4
atgaccttcgtggccatccataaaccatagcctttataactcacggtggaagcaatggtgtttatgaagccatctatcacgggatccctatggtgggcactcctttgtttgctgatcaagctgataacattgctcgaatgaaatccaagggaacagctgtcaggttggacttggaaacaatgtcaacaagagatttgctcaacgcattgaaggaagtcattaataatccttcctacaaagagaatgtgatgagattatcagccattcaacatgatcagcctatgaaacccttggacagagcagtcttctggatcgagtttgtcatgcgccacataggagccaagcacttgcagccagctatccatgacctcacctggttccagtaccattctctggatgtcattgggtttccactggcctgtgtgg

SEQ ID NO: 13861 - DNA, 405 bp, Bos taurus
  Clone ID: 59-LIB34-017-Q1-E1-G4
gaatttccggctgccagatgtgctcagtagtggccgccagattccagagcctctgcagattcagtccagggaagaagctgccaagtggaggaagattagggaagatctgtgttcaatggagctctccttgcagctgcggggggaagatgggagcgtctggaactacaagcccccagctgacaatggcgggaaagagatcttttccctgttgccccacatcgctgacgtgtccacctacatgttcaaaggcatcatcaactttgccaaggtcatctcctatttcagggacctgcccatagaggaccagatctccctgctgaagggggccgcctttgagttgtgccagctggagattcaacacggtgtgcaatgcaaagaccaggacctgggagtgcggtcggctgt

SEQ ID NO: 13862 - DNA, 146 bp, Bos taurus
  Clone ID: 59-LIB34-018-Q1-E1-G12
acccttcagtaaacgtaaaaaacatacatggggatcagtgaatctgcttgtactcaaatgtatgtcttctctggagttttctaaggaatcatttgaggcttaggattccagactttgagttattaaaatatgtatagttacccgtt

SEQ ID NO: 13863 - DNA, 430 bp, Bos taurus
  Clone ID: 59-LIB34-018-Q1-E1-G4
gacccacgcgtcaacccacgcaaccgctaaaccaaacaacccttatatcgtcccgtccaggcttatattacggtcaatgctcagaaatttgcgggtcaaaccacagtttcatacccattgtccttgagttagtcccactaaagtactttgaaaaatgatctgcgtcaatattataaaataaaaaaaaaaaaaaaaaaaaaaaaaaaaaaaaaaaagaaagtatggtaataggtcggatagaggccataagtctgtgttccgatcagcaaacctttctggaaatcagagtcaacagaaacaatttggaactatcgactcaacttagaaaggatagcttccactctgaagactttcaaagacaatttgccatcttggatgaagcaatgaaaggaacagtggtcacttacctgggtggccttccaaatgttcc

SEQ ID NO: 13864 - DNA, 362 bp, Bos taurus
  unsure (287): unsure at all n locations; Clone ID: 59-LIB34-019-Q1-E1-G3
gtggaacgtggacgatgtctacgagttcatccgctctctgccaggctgccaggaaatcgcaaaggagttccgtgcccaggagatcgacgggcaagctctgctgctgctcaaggaggaccacctgatgattgccatgaacatcaacctggggccagcccttaagatctacgcacgtatcagcatgctcaaggactcctagggctggccgggcgccggggctcctcctcccgaccgagcagagccggtggacactcctgggggcccagagcagggccggtcaagggaanggcccccgctgcggggcgtagctggagaggaggtctcgggacctccttggtggctctcaggggcctttctttctg

SEQ ID NO: 13865 - DNA, 401 bp, Bos taurus
  Clone ID: 59-LIB34-020-Q1-E1-G12
acaaaactttggcacaatgaagtgggtgacttttatttctcttctccttctcttcagctctgcttattccaggggtgtgtttcgtcgagatacacacaagagtgagattgctcatcggtttaaagatttgggagaagaacattttaaaggcctggtactgattgccttttctcagtatctccagcagtgtccatttgatgagcatgtaaaattagtgaacgaactaactgagtttgcaaaaacatgtgttgctgatgagtcccatgccggctgtgaaaagtcacttcacactctctttggagatgaattgtgttaagttgcatcccttcgtgaaacccatggtgacatggctgactgctgtgagaaaccagagcctgaaagaaatgaatccttcctgagcc

SEQ ID NO: 13866 - DNA, 377 bp, Bos taurus
  Clone ID: 59-LIB34-020-Q1-E2-G12
cgacccacgcgtccgacaaaactttggcacaatgaagtgggtgacttttatttctcttctccttctcttcagctctgcttattccaggggtgtgtttcgtcgagatacacacaagagtgagattgctcatcggtttaaagatttgggagaagaacattttaaaggcctggtactgattgccttttctcactatctccagcagtgtccatttgatgagcatgtataattagtgaacgaactaactgagtttgcaaaaacatgtgttgctgatgagtcacatgccggctgtgaaaagtcacttcacactctctttggagactaattgtgtaaagttgcatcccttcgtgaatcctaaggtgacatggctgactgctgtg

SEQ ID NO: 13867 - DNA, 423 bp, Bos taurus
  unsure (99): unsure at all n locations; Clone ID: 59-LIB34-020-Q1-E2-G4
acgcgtccgcagtgttgtgagggccctgtcggctcaccgcactttcttcctcccttcctccgcccgcagaagccagggtcgcccatggctggcttggangtactgttcgcgtcggcggcgccggccatcacctgcgcgcatgacgcgcttgtctgcttcctgcactgggacgtggtcacgcacggctactacggcttgggtgccggcgaccagccgggtcccaatgataagaaatcagaactgctgccagtggaatggaacagtaataaagacctgtatgtcctccggtatcagtccaacgatgggtccagaaagctcctcgtgaacgctgtcaccgtggaaaacagcatgatcatcaatgtgctggaacatggctcacagcaagtgtcagatttgaccctgaacttgaatgattatatcgat

SEQ ID NO: 13868 - DNA, 402 bp, Bos taurus
  Clone ID: 59-LIB34-021-Q1-E1-G4
catcatagtaataccaatcataattggaggattcggtaactgacttgttcccctaataattggtgctcccgatatagcatttccccgaataaataatataagcttctgactcctcgctccctcattcctactactcctcgcatcctctatagttgaagctggggcaggaacaggctgaaccgtgtaccctcccttagcatgcaacctagcccatgcaggagcttcagtaaatctaaccatttgctctttacacttagcacgagtttcctcaattttaggagccatcaacctcaattacacaattatcaacattaaaccccccgcaatgttacaataccaaaaccctctgttcgtatgattcgtaataattaccgccgtactagtactactctcgctccctgt

SEQ ID NO: 13869 - DNA, 436 bp, Bos taurus
  unsure (397): unsure at all n locations; Clone ID: 59-LIB34-022-Q1-E1-G4
ccaaaaattaagctcagaatattagaacgataaatttatgagtgttgaattatgaatattgattctcctaatttacttttggtaaccatttgaaaacatagaagttaaggataaggacttgcctggcagtccagtggttaagattctgcacttccaatgtaggggtctcagctttgatccttggttggggaactaagatcccacatgtttcacaacatggacaaataaataaattttaaaaatgtgtgaaaaaaaaagaaggatacattttcctgggtaaataggcgagtgcaaatattttttgttttttaattagggcagatacatataccctgacattcagctaggaagaaggaagggttgattttttttccccctagttaaagaatccagtcangagttatgtcgtaattatagaaaggtatcccaactccct

SEQ ID NO: 13870 - DNA, 389 bp, Bos taurus
  Clone ID: 59-LIB34-023-Q1-E1-G12
gaacggtctcccagaagcaatttagaatgactggtaaaacgaaatatacccaaagctcgcagcaacaataaaggatacagttctttctggccagcttcctgcttctgccctttctgctcgtctgcatcgtagagtctctcctgaagctttttattcctaagaagagaaaatcagtcaccggagagattgtccttattaccggagctggacacggtattggcaggcagactgcctacgaatttgccaaacttaagtgcaagctggtcctgtgggatattaataagcatggacttgaggaaacagccaccgaatgctagagactgggtgcaaaggctcatacctttgtggtagactgtactaaccgagaagatatttacagctctgcaaag

SEQ ID NO: 13871 - DNA, 450 bp, Bos taurus
  Clone ID: 59-LIB34-023-Q1-E1-G4
tccggggtcaacccaggcgtccgaaaatactaaaattactaaaaaatccttctgcacaatatgtgactgtatcaggacaggagtttatgattgaagtaaagaattctgctgtatcttgtataccaactgattgggttaagattggaagcacaaaagctgtgagccgctttcactctccttttattgtagaaaattacagacatctgaatcagctccgggagcagctagtccttgactgcagtgctgaatggcttgcttttctagagaatttcaatgaacattatcacaccttgtgtaaagcagtccatcacctagcaacgattgactgcattttgtccctggccaaggtcgctaagcaaagagattactgcagaccaactctacaagaagaaaggaaaatcctaataaaaaatggccggcaccctgtgaatgaagttcctgccggaaaac

SEQ ID NO: 13872 - DNA, 426 bp, Bos taurus
  Clone ID: 59-LIB34-024-Q1-E1-G4
cagaccatcctgtaatgcgacttcttctacttgtacatcacgaaagttctcaagggaaagaagctcagtctgcctgcgtaagtgccaaagaccaccaccagcatctgtcctcagggtgctcggacagaattcttagcgcagcaaaggctcaagatgcttgatacggaaaattggaaactcagctcttctgttgcagatagtcatcagtggctctgtaagaacccagagggaaagaaccagaaggtttctgtttaatgcatcttgccttatctttttttaatactatgtacaaagattttttacacaaagaaacttaatgctgtattaataaagtcagtgtgtagcttcaattgggggtagtccaaaagtgaagattttgtgatgaataagtgcaaactgttttggggtttttttaagtccttgaaa

SEQ ID NO: 13873 - DNA, 183 bp, Bos taurus
  Clone ID: 59-LIB34-025-Q1-E1-G4
cacactctacagagagtcttagtaacaatgaagtgggtgacctttatttctcttctccttctcttcagctctgcttattccaggggtgtgtttcatccaaatacatacaacagtcagaggggtcatcggtttaaagatttgggaaacaagcattttaaatgcctggtagtgattgccttttcg

SEQ ID NO: 13874 - DNA, 407 bp, Bos taurus
  Clone ID: 59-LIB34-026-Q1-E1-G12
ctgagtcctgaagtcgctgctgctgctacaaccatggtgtcagtaattaacactgtggacacttcccatgaggacatgattcatgacgcccagatggactactacggcacccgcctggcaacctgctcgtcagacaggtccgtcaagatattcgatgtgcgcaacggggggcagatcctcgtcgccgacctcaggggccatgagggtcctgtgtggcaggtggcctgggcccaccccatgtatggcaatatactcgcgtcctgctcctacgaccggaaagtcatcatctggaaagaggagaatggcacctgggagaagacccacgagcacacaggacacgactcgtcagtaaactccgtatgctgggctccccacgactatggcctcatcctggcctgcggcagctc

SEQ ID NO: 13875 - DNA, 378 bp, Bos taurus
  Clone ID: 59-LIB34-026-Q1-E1-G4
agctgtatgtcccaaagcgcagagaacatggccactcaaacggtaaccggaggtactagtctgatgaagacagcctgggcagctccggacgggtctgtgtggagaagtgggatcgcgtcaactcctcccgcctccacctgccgagaccttcggccgtggccctggaagtgcagaggctcaacgctctggacctcgagaagaaaatcgggaagtccattttggggaaagtccatctggccatggtgcgctaccacgaggctggccgcttctgcgagaatgacgaggagtgggaccgggagtccgcggtcttccacctggagcacgcacctgacctgggggagctggagggcagcgtgggcctgggactcatgtactcgc

SEQ ID NO: 13876 - DNA, 413 bp, Bos taurus
  Clone ID: 59-LIB34-027-Q1-E1-G4
caaggctgtatattgtcaactctcttatttaacttatattcagagtacatcatgcgaaatcctgggctggatgaagcacaacctggaatcaagattgctgggagaaatatcaataacctcagatatgcagatgacaccatcctaatggcaaaaagtgtagaggaactaaagagccgcttgatgaaggtgaaggaggagaatgaaaaagttggcttaaaattcaacattcaaaaaactaagatcatagcatctggtccccatcatttcatggcaaatatatggagaaataatggaaacagggacagattttattttcttgggctccaaaatcactgtggatggtgactgcacccatggaattaaaagacacttattccttggaagaaaagctatgacacagctagacagcctat

SEQ ID NO: 13877 - DNA, 390 bp, Bos taurus
  Clone ID: 59-LIB34-028-Q1-E1-G4
aaactataacctaggggtttctgttggatggttggcaactaagaatggaggaagaacaacaaagacatgttctccactttcttatttctcaaaacaatgttatcttcgtcgttttaagcttaggtttttaacagattaaacctttaaagcaagaagtgaattctgtcttttcagacccagaaatacacatgaatactttgctatgattacattttagatattcatttatacttttctatatctaagactcatatcttgatttttactatcatatatgaatgaagcctttatatcttgtttttttggcaatcttgaaagatagatgggaaaagataaaagaatgttgtcgaactcttgattggttagaaagtatttccagagtcaatgatg

SEQ ID NO: 13878 - DNA, 345 bp, Bos taurus
  Clone ID: 59-LIB34-029-Q1-E1-G4
caaattacctgaactgctatgtgtatgggttccatccaccccagattgaaatcgatttgctgaagaatggggagaagattaaatcggagcagtcagacctgtctttcagcaaggactggtctttctacctgctgtcccacgctgagttcactcccaacagcaaggatcagtacagctgccgagtgaaacacgttactttggaacaaccccggatagttaagtgggatcgagacctgtaagcagcaccatcgagatttgaacattcttcatttggtataatatctggaaaattctgtttccctgctctttaatactgatatgcttttatgctttatgcacataatc

SEQ ID NO: 13879 - DNA, 421 bp, Bos taurus
  Clone ID: 59-LIB34-030-Q1-E1-G4
caaaaacatgtgttgctgatgagtcccatgccggctgtgaaaagtcacttcacactctctttggagatgaattgtgtaaagttgcatcccttcgtgaaacctatggtgacatggctgactgctgtgagaaacaagagcctgaaagaaatgaatgcttcctgagccacaaagatgatagcccagacctccctaaattgaaaccagaccccaatactttgtgtgatgagtttaaggcagatgaaaagaagttttggggaaaatacctatacgaaattgctagaagacatccctacttttatgcaccagaactcctttactatgctaataaatataatggagtttttcaagaatgctgccaagctgaagataaaggtgcctgcctgctaccaaagattgaaactatgagagaaaaagtactgac

SEQ ID NO: 13880 - DNA, 266 bp, Bos taurus
  Clone ID: 59-LIB34-031-Q1-E1-G4
caccccccaggcactagaggtgaggctgcggcagggacaggctgactcctgtaccctcccttatcaggcaatctagcccatgcaggagcttcagtacatcgaaccagttgctctttacacttagcaggagtttcctcaattttacgaggcatcaattctcattaggaagcacttatcaacataatcgccgctcgcaatgtcacagtaccaaacccctctgttcgtatgatccgtaataattaccgccgtaggactacgactctcgc

SEQ ID NO: 13881 - DNA, 432 bp, Bos taurus
  Clone ID: 59-LIB34-033-Q1-E1-G4
actcgaaggtcgacgcaagcctctacagtgagtcgtattaggagaggcagtttattgcaaattccattataagactgatcagggcatcaaaaacctttctgttgaagatgcagcaagacttgcccacgaagatcctgactatggcctccgcgatcttttcaatgccattgccacaggcaactacccctcctggactttatacatccaggtcatgacatttagtgaggcagaaatttttccatttaagccatttgatcttaccaaggtttggcctcacggcgactatcctcttattccagttggtaaattggtcttaaaccggaacccagttaattactttgctgacgttgaacagttggcttttgacccaagcaacatgccgcccggcatcgagcccagccctgacaaaatgctccaaggccgcctttttgc

SEQ ID NO: 13882 - DNA, 405 bp, Bos taurus
  Clone ID: 59-LIB34-035-Q1-E1-G12
agatccttgacactgaaacgcaggcaaagagcatcatatacaactgaaaggaaactcagaggatggaatcaccaatgaaagtgaccatggctgaaaacgcaaaattttccgtggaaagctgagttcacatggtgatcagcctgttgctccgctatcgatatagaacttattcacatggactgttgaagaagctaggggtacctgttccaatacctctggctctttttggcaaagttctatcctatcgaaacgatgtctgtcaatttgatgaacaaggttttaaaaaatacgggaaaatgattcggatttttgaaggtaaacaaccactgttagctatcactgatccatacatgatcagaacaattgtattgacaaaatgttgttctggcttcacaaactgggggg

SEQ ID NO: 13883 - DNA, 431 bp, Bos taurus
  Clone ID: 59-LIB34-035-Q1-E1-G4
gatttctgggatctggctacaacagaaaggacagcggctccaacaagacttttccagagggtacccgggagttggaagagctgaagacacctccagactctggatttggggttctctgtccatgggtgcagcgcctgtgctcagctggtgagcttcatcctgagcgagcagccatggcattcaagaacgtgccctttcgctctgaggtcctgagttgggaccctaacacccttgcagactatttcaaaaagctaaactacaaggactgtgaaaaggtcgtgaggaaatatgacatcgatgggccacggtttctgaacctggcagagaacgacatccagaagttccctaagctccgcgtgccgattctgagtaagttaagtcaagaaatcaacaagaatgaagagagaaggagcattttcacacgcaaaccc

SEQ ID NO: 13884 - DNA, 423 bp, Bos taurus
  Clone ID: 59-LIB34-036-Q1-E1-G4
gttctgaaaccctagaggacgcaactgtgagtgtcgctgtcctagcctctcaacttgctttcctgtgtccaatagcactgcagactccagtgctagcctgtccagagcagcaagtgagaggaaacaagccagcattgtaagaggacatgcttctcctccctctctccgtgctgctcctgctcacacagccctggagatccctgggagcagaaatgacaaccttttctcagaaaatactggccaatgcctgtaccctggttatgtgtagccccctggagagtggcttgcctggtcatgatggacaagatgggagagaatgtccccatggagagaagggggatccaggttcaccaggacctgcaggacgagcaggaaggcctggatgggttggccctattgggccgaaaggagacaatggctttg

SEQ ID NO: 13885 - DNA, 433 bp, Bos taurus
  Clone ID: 59-LIB34-037-Q1-E1-G5
caacccacataactttggcacaatgaagtgggtgacttttatttctcttctccttctcttcagctctgcttattccaggggtgtgtttcgtcgagatacacacaagagtgagattgctcatcggtttaaagatttgggagaagaacattttaaaggcctggtactgattgccttttctcagtatctccagcagtgtccatttgatgagcatgtaaaattagtgaacgaactaactgagtttgcaaaaacatgtgttgctgatgagtcccatgccggctgtgaaaagtcacttcacactctctttggagatgaattgtgtaaagttgcatcccttcgtgaaacctatggtgacatggctgactgctgtgagaaacaagagcctgaaagaaatgaatgcttcctgagccacaaagatgatagcccagacctccct

SEQ ID NO: 13886 - DNA, 322 bp, Bos taurus
  unsure (143),(276): unsure at all n locations; Clone ID: 59-LIB34-038-Q1-E1-G4
aagcaactcaagtcattccaagttggctgctgaggctaagtttcgatttacatattccaaagatgatatttacagactgttgtcgtcatattctgctaagcaggaaaaaatgtttctgcatgtaaaagggaaagttcacctangaagatttgtgatgagaagtcgggatgtcatgctgcaaacaactttcttggattctataaatactctgccgactacttacgaaaaaggggaatattttgcatttttggaaacctaaggaacccactacagtanctctgggtctcttggaggactctatgaactaatataagttttggat

SEQ ID NO: 13887 - DNA, 309 bp, Bos taurus
  Clone ID: 59-LIB34-039-Q1-E1-G12
gggtcgacgcacgcctctagaatgaatcctattaatgcggtcacagtgctactggaatttgtcacggatgatgaagccacactggacgaatgctgtgccaaagatgatccacatgcatgctattccacagtgtttgggaaacttaagcatcttgtggatgagcctcagaatttaatcaaacataactgtgaccaattcgaaaaacttggacagtatggagtccaaaatgcgctcatagttcgttacaccacgaaagtaccccaagtgtcaagtccaaccctcgtggaggtttcaagaaccctaggaaaa

SEQ ID NO: 13888 - DNA, 355 bp, Bos taurus
  Clone ID: 59-LIB34-039-Q1-E1-G4
gccctcctgctgctctggggtctgtccctgagcccagtgactgagcaggcgacgttctttgaccccaggccatccctgtgggccgaggccggctcaccgctggcaccctgggccgatgtgacgctgacctgccagagcccgctgccgacccatgagtttcagctcctcaaggatggcgtgggccacgaaccggtgcacctggagtcccctgcccatgagcacaggttcccgctgggaccagtgaccagcaccatccggggcctctactgctgcatctacatgggcaacaacgattggatcagcccgagcaacctggtggaagtgaccggatcagagcccctgcgctgcacctcga

SEQ ID NO: 13889 - DNA, 458 bp, Bos taurus
  Clone ID: 59-LIB34-040-Q1-E1-G4
tcgcgggaccacccacgcgtccgcacaaagacatctcacgactaaacaaccaagatagaataaaacaaaacatttaatcccaatttaaagtataggagatagaaatctaagtacggcgctatagagaaagtaccgcaagggaacgatgaaagaaaaaactaaaagtataaaaaagcaaagattaccccttgtaccttttgcataatgaattaactagtataagacttaacaaaatgaattttagctaagcagcccgaaaccagacgagctactcacaaacagtttaccaagaactaactcatctatgtggcaaaatagtgagaagatttgtaagtagaggtgacatgcctaacgagcctggtgatagctggttgtccagaaaatgaatctaagttcagctttaaagataccaaaaattcaaataaaccccactgtagctttaaaagttagtctaaaaa

SEQ ID NO: 13890 - DNA, 391 bp, Bos taurus
  Clone ID: 59-LIB34-041-Q1-E1-G12
cgggtcgagcacgcgtctaaactaagtcgctgtatgccgcttcagaatgaagctgaacatctctttcccggccactggctgccacaagctcattgaagtggacgatgaacgaaaacttcgtaccttctacgagaagcgtatggccacagaagttgctgctgacgctctgggtgaagaatggaagggttatgtggtccgaatcactggcgggaacgataagcaaggtttccccatgaagcatggtgtcttgacccatggcagagttcgcctgctactgagtaatgggcattcctgttacagaccaaggacgactggagagagaaagcgcatatctgtacggggttgcattgtggatgccaatctgagtgttcccaatttgggcatcgtgaac

SEQ ID NO: 13891 - DNA, 368 bp, Bos taurus
  Clone ID: 59-LIB34-042-Q1-E1-G4
ccggtcgaccacgcgtccagaaaatctgagaagcacaattgagatcctgaggcgcaaagtcatagaacaagtacaacgtatcaacgttctgcagaaaaatgtcagggatcaactggtagatatgaaacgattggaggtggacattgatattaagatccgatcttgcaaagggtcatgcagtacagctttaaaacataaggtagatctggaggactataaaaatcagcagaagcaacttgaacagcgttattgccagaaacctacctccctctagagacattcaagacgtaccattgagaaaaaggaatacaacttacacggcctgtgcccaggagatctaggagccagcaccaggaggcccctccaga

SEQ ID NO: 13892 - DNA, 401 bp, Bos taurus
  Clone ID: 59-LIB34-043-Q1-E1-G12
atgaatttcatgcacttcgtccaagcccagatttagtttcagtgagttgattatgaagactgtgaaaggcttctatgtccttttcatgctgcatctatggttctttgactctggaaggaccggaaagatacttgtatggcccatggatttcagtcactggattaatttaaagattattctggatgaactccaccttcgtgggcatgagataactgtcctcgtaccttcaacaagttctctgcttgatcatacccagattccctttaacgtggagatccttgaaactccaataagtaaagaaagtttcatggaagaattcactgctaatctctacacactttgttttgaactgccgaaagtgtcatggtgggaaagggaactaccactgacaaaatgttgaa

SEQ ID NO: 13893 - DNA, 413 bp, Bos taurus
  Clone ID: 59-LIB34-043-Q1-E1-G4
aggcgggccgagagcgtgagtcgctcgcccggggctgcctgcagtcccgctgccctccgagcgcagccatgtccgaggagaagcccaaggagggagtgaagacggagaatgaccacatcaacctgaaggtggccgggcaggatggctccgtggtccagttcaagatcaagagacatacaccgctcagcaagttgatgaaggcctactgcgagcgccagggcttgtcaatgagacagattcgattcaggtttgatggacaaccaattaatgaaacagacaccccagcacagctggagatggaagacgaggacaccatcgacgtgttccagcagcagacggggggctccagggtggccagctgcctcttggggagcggcctctagagcccccatcccctcgtggcaccgtgctgt

SEQ ID NO: 13894 - DNA, 370 bp, Bos taurus
  Clone ID: 59-LIB34-045-Q1-E1-G4
gtccgaggcccgcggctgcctggctgcctggccctggctgccctgttcagcctcgtgcacagccagcatgtgttcctggcccatcagcaagcatcctcgctgctccagagggcccgccgtgccaacaagggcttcctggaggaggtgcggaagggcaacctggagcgagagtgcctggaggagccatgcagccgcgaggaggccttcgaggccctggagtctctcagtgccacggatgcgttctgggccaagtacacagcttgtgagtcagcgagaaatcctcgagaaaagctcaatgaatgtctggaaggaaactgcgctgaaggtgtggggatgaactaccgagggaacgtgagcgtcacccggtcag

SEQ ID NO: 13895 - DNA, 316 bp, Bos taurus
  Clone ID: 59-LIB34-047-Q1-E1-G4
gggaccccgctcattttgtttgccgccttggggctggttgccgggggaatgactctgcttcttccggagaccaagggggtcactttgccagagaccatcgaggatgccgagaacctgcagaggaaagcaaaacccaaagaaaacaagatttaccttcaggttcaaacatcagaactcaacacacaggcagccgagagagatgcttcgcaggggaccgcgcagcagaagtgaagaccgagttctcaccctttcagaagccctgaacgcttcctcccacctgcctgccctcaaatcaatatcagttctagagaaggct

SEQ ID NO: 13896 - DNA, 430 bp, Bos taurus
  unsure (190),(331),(410): unsure at all n locations; Clone ID: 59-LIB34-048-Q1-E1-G4
tgagcacacatatattcacggtccggaatagacgtcgacacacgagcctacttcacatcagccactataattattgctattccaaccggggtaaaagtcttcagctgattggcaacacttcatggaggtaatatcaaatggtctcctgctataatgtgagccctaggctttattttcttatttacagtanggggtttaactggaattgtcttagccaactcttccctcgatattgttcttcacgacacatactacgttgtcgcacatttccactatgttttatcaataggagctgtatttgctattatagggggatttgttcattgattcncactattctcaggttatactctcaacgatacatgagccaaaatccacttcgcaattatatttgtaggcgtcaatataancttctttccacaacactttc

SEQ ID NO: 13897 - DNA, 419 bp, Bos taurus
  Clone ID: 59-LIB34-049-Q1-E1-G4
gggtcgagcacgcgtccgacatcgagggcctgacagagtattcactcctggttagaaaactccgcttgaacatggatgtcaaagtgtcttacaagaataaaggtgacctctaccactataagatgtcagacaagtatttccttgggaggccaatataggtacctctcaatgatgacctcgtcgtcctaagtaccggacaaagcagtggcttggctacagtgcatgtaaaaactgtggttcacaaaatcagcacctcggaggaagtttgcagcttccatttgaaaattgaaacccgggaaattgaagccttcggctacagcagctcagaatacaagcgcatagtggcctgcgccagctacaagctcagcagtgaggaatcgtcatctgggtcatctcacgcggtgatggatatctctctg

SEQ ID NO: 13898 - DNA, 440 bp, Bos taurus
  Clone ID: 59-LIB34-050-Q1-E1-G4
ccacccacgcctccgaaaggattgtgaaggcagctccctgccggccgcatttaaacactttgccctgatgcagcgggacagctgggtggacatcttccgacttctcttctggggcggttcctatggtggtgctggacagccccagctcatcagccgcaactggtttggtctgccgggacgactggatgcggccatggccggccacatctatgtctcaggctcagctcccagcttcccccgggccaagatgactaagtctgcacgccgccatcgcaaacgctaccgctcgctccgaagccgtggtcgaggccgcggccgaaaccagaacccctaccggcgatctcgatctgccttcctgtcctggctctccagcgaggagctgggcctgggagccaacaactatgatagcttcgagatggactggcttgtgcctgccacct

SEQ ID NO: 13899 - DNA, 247 bp, Bos taurus
  Clone ID: 59-LIB34-051-Q1-E1-G12
ccccggaggcgaaggacgcggtttctggaggcgaagaacgcggttggccaatcgcaagccagaagatgaaggttctgtgggttgccgtggtggtcgcgcttctggcaggatgccaggcggatatggagggagagctggggcccgaggagcccctgactacccagcagccccgggggaaggacagccagccttgggagcaggcgctgggccgcttctgggattacctgcgctgggtgcagaccctgtt

SEQ ID NO: 13900 - DNA, 233 bp, Bos taurus
  Clone ID: 59-LIB34-051-Q1-E1-G4
ggactacagcctacccgcggctcacaagatgtcaggcatggcaagccggctgctcggaccctcgtttgagccctacctgctgccggaactgaccagatatgactgtgaggtgaacgtgcctgttccgggaacctccacgctcctccaaggaggggatctcctccgagccctggaccaggccacctgagccagggccgcccgccaataggcacccttcccacgccgtcccacca

SEQ ID NO: 13901 - DNA, 243 bp, Bos taurus
  Clone ID: 59-LIB34-054-Q1-E1-G4
agccccgggcccgccgacaccatgagttggtcctcgcaccctccgagtgtaatcttctacattctttcattgctttcttcagcatgcctggcatatgttgctacccgagacaactgctgcatcttagatgaaagatttggtagttattgcccaactacctgtggcagtgcaaaactcctgaataattaccaaaccagtgtagacaaagatctacgaactttggaaggcatcttatatcaggta

SEQ ID NO: 13902 - DNA, 351 bp, Bos taurus
  Clone ID: 59-LIB34-055-Q1-E1-G12
aggcggcggctctggatccactgcccacatcccgctctcgcatgcagacatgagggcagagagaacttccttcctcctggccctggggctcctgatggctgggatccgcagtgtccactgcctctcagaaaatgtggtggtgaatgaccagcacattacggtggatggccacacgttagcctccagcaacaccgacttcgccttcagcctcgacaaccagttggctttgcagaaccccaataagaatgtcatcttatccccgctgagtgtctccatagccttggccttcctgtctctgggggcccgtggctccatcctgacagagatcctggaaggtctcaagttcaacct

SEQ ID NO: 13903 - DNA, 354 bp, Bos taurus
  Clone ID: 59-LIB34-055-Q1-E1-G4
ggttctgaaaccctagaggacgcaactgtgagtgtctctgtcctagcctctcaacttgctttcctgtgtccaatagcactgcagactccagtactagcctgtccagagcagcaagtgagaggaaacaagccagcattgtaagaggacatgcttctcctccctctctccgtgctgctcctgctcacacagccctggagatccctgggagcagaaatgacaaccttttctcagaaaatactggccaatgcctgtaccctggttatgtgtagccccctggagagtggcttgcctggtcatgatggacaagatgggagagaatgtccccatggagagaagggggatccaggttcacca

SEQ ID NO: 13904 - DNA, 377 bp, Bos taurus
  Clone ID: 59-LIB34-056-Q1-E1-G4
ccccgtgcaaagggctgtaccacatagcccaccagctgagacatgctacttcctgtgttttcggaggacggggtcgtctcgtccagtagctaacttatttagagacatttccttctgtgggcactgcctgcctcccacctggttcccaggaagtagtgggcccgtttctgagaagagctggaatccacgactacattccaaagcagtctaaaaatgttttccttttggtgtgggtgtgcttttaattttgagatgaacttttgaacactgggatctctgaaactactaggttcgtaggactgtcattgtgaaaggcacttgcttgcagctttaacagtgagaagctcttcccaaataaaacttgtcttcgagtgtat

SEQ ID NO: 13905 - DNA, 224 bp, Bos taurus
  Clone ID: 59-LIB34-058-Q1-E1-G4
ctggggggtgacctgctccgggccctcaatggcatcaccgagtcgggccgcattggtttcgggtccttcgtggacaagacggtgctccccttcgtcaacacgcaccccgagaagctgcggaacccctgccccaacaaggagaaggagtgccagcccccgttcgccttcaggcacgtgttgaagctcactgacaactccaaacagttcgagacagaagtcgggaa

SEQ ID NO: 13906 - DNA, 207 bp, Bos taurus
  Clone ID: 59-LIB34-059-Q1-E1-G4
ggcggtcgtccccgcgtgaggtactctgtggtgtagcgtgcgcaggtagcaggagaagcagctgccgtgcgggggagccatgaagcactatgaggtggagattctggacgccaagacccgggagaagctgtgcttcctggacaaggtggagccccaagccaccattgccgagatcaagaaccttttcaccaagacccacccacagtg

SEQ ID NO: 13907 - DNA, 313 bp, Bos taurus
  Clone ID: 59-LIB34-060-Q1-E1-G12
ggaactgattgccttttctcagtatctccagcagtgtcaattttataaggaagtaaaatgaccggtggggcgacgatggtttggagcgacaggtgttgcggggacgagatgatcatgacctcggggcgctcacggtacagatgcgctggggatcaagtcggtgacgttgcagcgcttcctgaaacctatggtggcatggctgactgctgtgagaaacaagaagctgaaagacatgaatgcttcctgagccacaaagatgatagcccagacctccctaaattgaaaccagaccccaatactttgtgtgatgagt

SEQ ID NO: 13908 - DNA, 415 bp, Bos taurus
  Clone ID: 59-LIB34-061-Q1-E1-G12
cgacccacgcgtccggcattaggttaatttccaaagaagaaaaactcacagataacaacaggttttattgcagtcattgcagagctcgtcgggattccctaaaaaagatagaaatctggaagctgccacctgtgcttttagtgcatctgaaacgtttttcctatgatggcaggtggaaacaaaaattacagacatctgtggactttccattagaaaatcttgacttgtcgcagtatgttattggcccaaagaacaatctgaagaaatacaacttgttttctgtttcaaatcactacggtgggctggacggtggccactacactgcctattgtaaaaatgcagcaagacagcggtggtttaaatttgacgatcatgaggtttctgatatttccatttcttcggtgaaatcttcagc

SEQ ID NO: 13909 - DNA, 331 bp, Bos taurus
  Clone ID: 59-LIB34-061-Q1-E1-G4
gcctcaagctgcctgcttgctaaaacaccggggcctctctgaagccaccatgaaatccttcgttctgctcttttgcctggctcaactctggggctgccactcgatcccgcttgacccggttgcacgttataaggaaccggcctgtgatgacccagacacagagcaagcagccttggctgccgtggactacatcaacaagcaccttcctcggggctacaagcacaccttgaaccagattgacagtgtgaaggtgtggccgatgcggtccacgggagaggtgtatgacattgaaatagataccctggaaaccacctgccacgtactggacccc

SEQ ID NO: 13910 - DNA, 204 bp, Bos taurus
  Clone ID: 59-LIB34-062-Q1-E1-G12
atcaggcaggacacggagaaggaggtcactctggaggaccggactggacaaggcttgcgatccgggcatggactatgggtacaataccatccgtatccattcgagcctgggagatgactgtgcctagtacatcatggtgctcgagagcatcatcatatcgggctcggacgaggtgcaggttaaacaggagctcaagttcatcat

SEQ ID NO: 13911 - DNA, 181 bp, Bos taurus
  Clone ID: 59-LIB34-062-Q1-E1-G4
gcccgccgtctgggccgggccgcggatgcggcgcagcgcctcggcggccaggctctctcccgtccggccagcttgctaccttcctcggctccgtccttgtccgccagcgggggccaccgcgtgtccccgcgtcctcctagtccggtcctctacgcgcgccggctgctgatcttgtctgtct

SEQ ID NO: 13912 - DNA, 216 bp, Bos taurus
  Clone ID: 59-LIB34-065-Q1-E1-G4
atctgtggatcctgtgacaggggacctgtgggttggctgccaccccaatggcatgaaaatcttctcctatgacccagagaatcctcctggatcagaggtgctccaaatccagaatattttagcagaagaacccaaagttacggtggtttatgcagaagatggtaaagtgttgcatggaagtacggttgcttctgtgtacaaggggaaaatgctgga

SEQ ID NO: 13913 - DNA, 203 bp, Bos taurus
  Clone ID: 59-LIB34-066-Q1-E1-G12
ctctccgcttcctcctttcctcaggcatcaaagcagagaccacgggaacctagttcaccaggctcgaggctggaggccccgccatgacatccctaaggccccttctgatgctggccctgctggcgtgggttgttgtggctgaccaagagtcctgcaagggccgctgcaccgagggcttcaacgccaccaggaagtgtcagtga

SEQ ID NO: 13914 - DNA, 264 bp, Bos taurus
  Clone ID: 59-LIB34-066-Q1-E1-G4
gaaaaagatgccatacctgaaaacctgcccccattaactgctgactttgctgaagataaggatgtttgcaaaaactatcaggaagcaaaagatgccttcctgggctcgtttttgtatgaatattcaagaaggcatcctgaatatgctgtctcagtgctattgagacttgccaaggaatatgaagccacactggaggaatgctgtgccaaagatgatccacatgcatgctattccacagtgtttgacaaacttaagcatcttgtg

SEQ ID NO: 13915 - DNA, 200 bp, Bos taurus
  Clone ID: 59-LIB34-068-Q1-E1-G12
caggatttctttatcgacctgcgtctcccctactcggtggtgcgcaacgagcaagtggagatccgagcgatcctctacaactaccgggaggcggaaaatctcaaggtgagggtggaattgctctacaatccagccttctgtagcctggccaccgccaagaagcgccaccagcagactataacaatcccagccaggtcctc

SEQ ID NO: 13916 - DNA, 240 bp, Bos taurus
  unsure (210): unsure at all n locations; Clone ID: 59-LIB34-070-Q1-E1-G12
atacaattggaggactggaatggcagaaccagcactgcagattatgcttcattcaaggtgacaggtgaaaatgacaaataccgcctgacatatgcttacttcattggtggagatgctggagatgcatttgatggctacgattttggcgatgattctagtgacaagtttttcacatcccataatggcatgcagttcaagtacttgggacangtgacaatgataagttatgaatggggcaac

SEQ ID NO: 13917 - DNA, 384 bp, Bos taurus
  unsure (328): unsure at all n locations; Clone ID: 59-LIB34-071-Q1-E1-G4
atgaacaactgtcgctgaagaaacgaaaatgggcaatcgtcatagccaatcttactccctgccagaaggcagtcaacacttgcccaaagggcaggccttaccctcggcagacctgcagcctctcagccacccatcagggagtggagagccagagtcccaccagcctgccaaagggaaaagtcatcagggcttggatgcccacagccatcagcgttttgatgccgatcgagatgccaaaaagctgaacaaagcctgcaaaggaatgggaactgatgaagccaccatcatcgaaatcttatcaagcaggacatcgcatgagaggcaacanataaaacgaaagtacaagacaacgtacggcaaggacctggaggaggtgctcaagag

SEQ ID NO: 13918 - DNA, 424 bp, Bos taurus
  Clone ID: 59-LIB34-074-Q1-E1-G4
gggccgagccacgcgtccaagaaaacagagaaaatcagcatgagtactaccgggaaagttatcaggtgcaaagcagccatagtctggaagcctggtggatcattttccattgaggaggtagaagtggctccaccaaaggcaaaagaagttcgcataaagatggtggccacggcgctctgtgggactgagatgaaaatgttgaaggataaaaatcttcagcaccaacactaccctatcattatgggccatgaaggagctggaatagtcgagagtgtgggagaaggagtgagcacagtgaaagcaggagataaagttatcgcactctttctaccacagtgtggtgaatgcacctcttgccttaattctgcagacaatttttgtataaaactcaaacaggcagaaacccacctgatgtctgatggta

SEQ ID NO: 13919 - DNA, 410 bp, Bos taurus
  unsure (20)...(21): unsure at all n locations; Clone ID: 59-LIB34-075-Q1-E1-G12
ggctcggcccacgcgtcagnnggaagcgaggtgtatcactgcagtggcaatgggagctgggtgaacaaagtgctgggcatagagccgccaaaatgcattgcagtctgtggcacccccagcgagccttttaggataacacaaagaatacttggaggctccattgcgaagattgaaaatttcccctggcaagtcttcttctcgaacccatgggctggtggggctctcattgatgaatactgggtgctgacagctgcccatgtcgtggagggaaacgatatcccagtgatgtatgttgggtcctcctcagtggtcacctcacaattgtcaaatgctcaaatgctcactgcagagagagtgtttatccatccaggatgggatgtcctggattcttcgataacaccaaagaattt

SEQ ID NO: 13920 - DNA, 332 bp, Bos taurus
  Clone ID: 59-LIB34-075-Q1-E1-G4
cttggccttcctgtccctgggggctcaggaccacactgtgacagagatcctggaaggtctcaggttcaacctcacagagacccccgagacagaaatccaccagggcttccagcacctcctgcagacgttcaatcagcccagcaaccagctgcagctgagcgtgggcaacgctatgtttgtgtcagaggagctgaagctgctggccaaattcaggaaagatgccgaggctttttacgcctctgaggttttatccactaacttcagggattctgaagctgccgtaaagcttatcaatgaatatgtgaagaataaaactcatgggaaaaattggg

SEQ ID NO: 13921 - DNA, 336 bp, Bos taurus
  Clone ID: 59-LIB34-076-Q1-E1-G4
ccacgcgtccggtcatctttggaaaaatgtctatttagttctttggcccattttttgattgggtcatttatttttctagaattgagctgtaggagttgcttgtatatttttgagattaattgtttgtcagctgcttcatttgctattattttctcccatcctgaaggctgccttttcaccttgctaatagtttcctttgttgtgcagaagcttttaagtttaattaggtctcatttgtctacttttgctgttatttccggtattctgggacgtgggtcatagaggatcatgctgtgatgtatgtccgaaaatgttgtgcctaggttctcctctcac

SEQ ID NO: 13922 - DNA, 373 bp, Bos taurus
  unsure (12),(22): unsure at all n locations; Clone ID: 59-LIB34-077-Q1-E1-G12
gctactatgtgncggagccacnctacatcaaatatttgtgaagtcaatactggaagcttgcttacattgaatttagaaaaacttttatactcttttctgttaatacttctttttaaactgaatcagagtagccacatttggaacactttttgttatcatttgatatttttaagtacttagaacctggtcctaagcctaaaatgggcttgattttgggaaataaatcttctcacaactgccttgatgcacagtaacctttttaaaaatagatactccctaaagtcttttgttcacatggtcacacactgatgcttagatattccagaatctaatatggccacagtagttttgaaaaccaaagtcattttttttt

SEQ ID NO: 13923 - DNA, 380 bp, Bos taurus
  unsure (376): unsure at all n locations; Clone ID: 59-LIB34-078-Q1-E1-G4
tatagaaagtcgaattagttacaagggtctgaagatcttgttatattatattgctggtagcctatcaacaatgttccgtgttgaatatgcatctaaagttgatgagaactttgactgtgtagaggcagatgatgttgaggggaaaattagacaaatcattccacctggattttgcacaaacacaaatgattttctttcgttgctggaaaaagaagctgatttcaagccatttggaaccttacttcacacatactctgttctcagtccaacaggaggagaaaactttacctttcagatttataaggctgacatgacatgtaaaggctttcgagaatatcatgaaaggcttcagacctttttgatgtggtttattganactg

SEQ ID NO: 13924 - DNA, 411 bp, Bos taurus
  unsure (272): unsure at all n locations; Clone ID: 59-LIB34-079-Q1-E1-G4
agacaggagagaccaatccgaaagagtatagaagatttacgtaatactgtggactctgtttcccggacctcttcttccacctttcaatatataactctgctaaaaaacatgtggaaaggaaggcagaatcaagtacaagataatgaaaatgtagtaaacgagtactcctcacatctggaaaagcaccagttatatatagatgagactgtgaagaataatatcccaactaagcttcgtgtgctccgttcaattctggagaatttgagaagcanaatacaaaaattagaatcggatgtctcaactcagatggaatactgccgcaccccgtgtactgttacttgcaatattcctgtggtgtctggcaaagaatgtgaggaaatcatcaagaatggaggttaaacatctgaaatg

SEQ ID NO: 13925 - DNA, 419 bp, Bos taurus
  Clone ID: 59-LIB34-080-Q1-E1-G12
gacccacgcgtcagcatccccgaagatgccatcttcacaatgcccgacagaggtgaatgtgttcctggagagcaggatccagtgcccactccagtctcgagggctcggcgggctgtgctgacccaggaagaggaaggctctggggctggacaaccagtaactaatttcagcaagaaagcagattcctgccagctggactactcacaagggccttgcctggggctgttcaagaggtatttctataacggtacatccatggcctgtgagaccttcttatatggcggctgcatggggaatggcaacaacttcctctcggagaaggagtgtctgcagacctgccggactgtggaggcctgtaacctccccatagtccaggggccatgccgaagctacatccagctctgggcatttgatgctgt

SEQ ID NO: 13926 - DNA, 434 bp, Bos taurus
  unsure (115): unsure at all n locations; Clone ID: 59-LIB34-080-Q1-E1-G4
ccacgcgtcaaccaaagaggtgtccttcgatgtggagctgcccaagacagccttcatcaccaacttcaccttgaccatcgatggtgttacctacccgggaaaggtcaaggagaangaagttgccaagaagcaatatgagaaggccgtgtcccagggcaagacagctggcctggtcaaggcctctgggcggaagctggagaaattcacggtctcagtcaatgtggctgcaggcagcaaggtcacttttgagctaacctacgaggagctgctcaagaggcataagggcaagtacgagatgtacctcaaggtccagcccaagcaactggtcaagcactttgagatcacggtagacatcttcgagccacagggcatcagcaccctggatgctgaagcctcgttcatcaccaatgacctcttgggcagcgccctcacca

SEQ ID NO: 13927 - DNA, 460 bp, Bos taurus
  Clone ID: 59-LIB34-082-Q1-E1-G4
tccaccacgcgtccgatacgacaaagacaacgacggctggaaaactacagatcccagaaagcagtgttctaaagaagatggtggtggatggtggtataaccgatgccatgcagccaatcccaatggcagatactactggggtggagcgtacacctgggacatggcaaagcacggcacagacgatggagtggtgtggatgaactggcagggctcctggtactcaatgaagaagatgtccatgaagatcaggccttacttcccagagcaatagtaccccccacacagagtattattcttccacatgtaataacatttttatatatcatgttatcagaaattttttttcataccttatatctctctaaagctatcaaaatgtagttggtgtgagttttcagaaaaagtttttaggacaaatgacattaaaaacagcacatggttttctttcatatttgtcatt

SEQ ID NO: 13928 - DNA, 255 bp, Bos taurus
  Clone ID: 59-LIB34-084-Q1-E1-G12
cccacgcgtccatggttttctttcatatttgtcatttccattgtgtaccaagaagtaactaaaaggatgattgtggacagtcagtgttcataatttccattccagtggattgtgagaaatttcaaattaggaagagaaattgaggtgaagtaaaatcatgtgtttaaaatccactttgaacctctctttatttatgtaagatctatcacagaaaactcaaaaagatttattcattaaaccggtttatgttacaat

SEQ ID NO: 13929 - DNA, 308 bp, Bos taurus
  Clone ID: 59-LIB34-084-Q1-E1-G4
cgtccgagcggattctggaggcgaagaacgcggttggccaatcgcaagccagaagatgaaggttctgtgggttgccgtggtggtcgcgcttctggcaggatgccaggcggatatggagggagagctggggcccgaggagcccctgactacccagcagccccgggggaaggacagccagccttgggagcaggcgctgggccgcttctgggattacctgcgctgggtgcagaccctgtctgaccaggtgcacgaggagctgctcaacacccaggtcattcaggaactgacggcgctgatggaggagacca

SEQ ID NO: 13930 - DNA, 386 bp, Bos taurus
  Clone ID: 59-LIB34-085-Q1-E1-G4
aacatgtgagcatggtgctgcgcgcggtgctgagcgtgcgggccgcagtcggcggcctgcacgtcaactcggaacatatcacgccctggttgccgctgcactgtggactgctagcgggtgcattccgggaacggtgcaccggacctgctctgctgtcggtgctgaacttcacatcacaacatgaatgggtaacaacagaaaatggtgtcagaacagtgtgaatcagcaattttgcacacgaagctttgggatatgttgtttactgtatgtctgcccagacgttgggacagagttgatcacacatcatcgagtttggtgctttggtaagtgtgatagctgctagtgaactctactctcctctatcacgacagctaactgaaattaat

SEQ ID NO: 13931 - DNA, 461 bp, Bos taurus
  unsure (449): unsure at all n locations; Clone ID: 59-LIB34-086-Q1-E1-G4
ccgggtagaccacgcgtccggcaaatcccccaaaggcaccatggccgccctgggcatcacggtcgccctgctggtgtggatggccaccctgctgttcatctccatctggaagcacatctacagcagctggaaactgccccctggccctttcccactgcccatcatcgggaatcttttacagctggatattaagaacattcccaaatccttcaccaggctggcggagaggtacgggccggtgttcaccctgtacctgggctctcagcgtgccgtggtcgtgcatggctacaagcccgtgaaggaggtcctgcttgactacaagaacgagttttctggcagaggagaaaaccctgggttccagatgcacaagaacaatgggatcattttcaacaatggattaacctggcgggacacccgacggttctcgttgaccaccctccgtgacttanggatgggaaaac

SEQ ID NO: 13932 - DNA, 368 bp, Bos taurus
  unsure (307): unsure at all n locations; Clone ID: 60-BOVMS1-001-Q1-E1-G8
atgcgacgtcatagctcttctatagtgtcacctaaattcaattcactggccgtcgttttacaacgtcgtgactgggaaaaccctggcgttacccaacttaatcgccttgcagcacatccccctttcgccagctggcgtaatagcgaagaggcccgcaccgatcgcccttcccaacagttgcgcagcctgaatggcgaatgggacgcgccctgtagcggcgcattaagcgcggcgggtgtggtggttacgcgcagcgtgaccgctacacttgccagcgccctagcgcccgctcctttcgctttcttcncttcctttctcgccacgttcgccggctttccccgtcaagctctaaatcgggggctcccttt

SEQ ID NO: 13933 - DNA, 420 bp, Bos taurus
  Clone ID: 60-BOVMS1-002-Q1-E1-G12
tcaagaagaagatgcagatgctcaagctcgacaaggagaacgccttggatcgagcggagcaggcggaggccgataagaaggcagcggaggacaggagcaagcagctggaagatgagctggtgtcgctgcaaaagaaactcaaggccaccgaagatgaactggacaaatactccgaggctctcaaagatgcccaggagaagctggagctggcggagaaaaaggccaccgacgctgaagccgacgtagcttctctgaacagacgcatccagctggttgaggaagagttggatcgtgcccaggagcgtctggcaacagctctgcagaagctggaggaggccgagaaggcagcagatgagagtgagagaggcatgaaagtcattgagagccgagcccaaaaggatgaggagaagatggagattc

SEQ ID NO: 13934 - DNA, 97 bp, Bos taurus
  Clone ID: 60-BOVMS1-003-Q1-E1-G8
aaaaaaaaaaaaaaaaaaaaaaaaaaaaaaaaaaaaaaaaaaaaaaaaaaaaaaaaaaaaaaaaaaaaaaaaaaaaaaaaaaaaaaaaaaaaaaaaa

SEQ ID NO: 13935 - DNA, 407 bp, Bos taurus
  Clone ID: 60-BOVMS1-004-Q1-E1-G12
atgcgacgtcatagctcttctatagtgtcacctaaattcaattcactggccgtcgttttacaacgtcgtgactgggaaaaccctggcgttacccaacttaatcgccttgcagcacatccccctttcgccagctggcgtaatagcgaagaggcccgcaccgatcgcccttcccaacagttgcgcagcctgaatggcgaatgggacgcgccctgtagcggcgcattaagcgcggcgggtgtggtggttacgcgcagcgtgaccgctacacttgccagcgccctagcgcccgctcctttcgctttcttcccttcctttctcgccacgttcgccggctttccccgtcaagctctaaatcgggggctccctttaaggttccgatttagtgctttacggcacctcgaacccaa

SEQ ID NO: 13936 - DNA, 387 bp, Bos taurus
  Clone ID: 60-BOVMS1-005-Q1-E1-G8
atgcgacgtcatagctcttctatagtgtcacctaaattcaattcactggccgtcgttttacaacgtcgtgactgggaaaaccctggcgttacccaacttaatcgccttgcagcacatccccctttcgccagctggcgtaatagcgaagaggcccgcaccgatcgcccttcccaacagttgcgcagcctgaatggcgaatgggacgcgccctgtagcggcgcattaagcgcggcgggtgtggtggttacgcgcagcgtgaccgctacacttgccagcgccctagcgcccgctcctttcgctttcttcccttcctttctcgccacgttcgccggctttccccgtcaagctctaaatcgggggctcccttttaaggttccgatttagtgc

SEQ ID NO: 13937 - DNA, 350 bp, Bos taurus
  unsure (329),(338): unsure at all n locations; Clone ID: 60-BOVMS1-006-Q1-E1-G12
ctctaagcaacagcaggatgaattcaaggaggcgtttctcctgttcgacagaacaggtgaatgcaagatcaccttaagccaggttggtgatgtccttcgggctctgggcacaaatcccaccaatgcagaggtcaagaaggtgctgggaaaccccagcaatgaagagatgaatgccaagaaaattgagtttgaacaatttctgcccatgttgcaagctatttccaacaacaaggaccagggcacttatgaagactttgttgagggtctgcgtgtcttcgacaaggaaggcaatggcaccgtcatgggtgctgaacttcgtcatgttctanccacactanggtgaaaagatg

SEQ ID NO: 13938 - DNA, 419 bp, Bos taurus
  Clone ID: 60-BOVMS1-006-Q1-E1-G8
cgcgtccgcaataaaaaaaaaaaaaaaaataaaaaaaaaaataaaaaataaaaaaaaaataaaaaaaaaaaaaaaaaaaaaaaaaaaaaaaaaaaaaaataaaaataataaaaaaaaaattataaataagaaaaaaaatagggggggcccccccaatttttttttttttttttttttttcaaaaataggtttattttttcccactcggaatttaagttatttttttaaaaagttttttttgaatttaaccgttcatttttttttaatttttttcccaattttaatggcatttaattttcctccttacccttttttcaaaatttttgggcttttccaattttttaatattttggggtgcaaccctttttttcaccccgggtctcttttttttcccccaaaatttttccttttccctttta

SEQ ID NO: 13939 - DNA, 295 bp, Bos taurus
  Clone ID: 60-BOVMS1-008-Q1-E1-G8
actgaagaccgacaagttcgagtacggggagaagctgaagcgccagaaatacgatatcatgaacgtccgggccagagtggagatgctggccaagttcagcaagaaggccgggaccgcgcccaagggcaaagtcggcgggcgctggaagtagagcggccaaggaggttcccagaggcagaggccctcagcccgggggtccacgcagcggcgcccggcccccaggggctccccgcgtccctgtcctcactgcgtccatgctctggggcctgcgaataaagcgagcaagctcccctcc

SEQ ID NO: 13940 - DNA, 144 bp, Bos taurus
  Clone ID: 60-BOVMS1-009-Q1-E1-G8
aacacagggatgaagattgggcggattgaggatgtcacccccatcccctccgacagcacccgcaggaaggggggtcgccgtggtcgccgtctgtgaacaggacttctcaaattattgctttctgttaataaattgctttgatgt

SEQ ID NO: 13941 - DNA, 145 bp, Bos taurus
  Clone ID: 60-BOVMS1-012-Q1-E1-G6
cccggaggtagccgcatccttgggggaagggaaacgtgcatggtcacagtgtatggtttggtcccttgggacgtgtcatagcattttgtttgtttgtttgtttcgtttagttttgggtggagctgaataaacccacatctcaggg

SEQ ID NO: 13942 - DNA, 428 bp, Bos taurus
  unsure (242): unsure at all n locations; Clone ID: 60-BOVMS1-013-Q1-E1-G8
attccttccagacacatccccagaaggggccgcgcctcccgcccggggcgggggaacgaaagcggctcggggggcggcgccgcccacgcccgagggccgcgcggtgtcgatggctgcaagggccgacttcttactgcacgccctccatcatcttcaggaactcgtcgaagtcaatgcggccgtcgttgttcttgtccccgtccttcatcagggattcgagctcctcgtctgtcacgtgctcnccggaagctcggaaaatctccgccagctcctcggcgtcgatgtagccgtccgcgttcctgtcgaagatgcggaaacactcagccagctcctcctcggtcttgcccttggcgtcctctttcatctggcgccacatcatgaccaatgactcctcgaagtcgatggtgccgctggcatcctcatccaac

SEQ ID NO: 13943 - DNA, 370 bp, Bos taurus
  Clone ID: 60-BOVMS1-014-Q1-E1-G12
atcagaccatatataaatggattaaagataacatctctcccaaacttcatgtagataaaggatttgtgaacatcttaatgactagcttcttacagtacatttctagtgaagtaaacccacccagtgatgaaacagattcttcctctgctccttccaaagaacagttagagcaggaaaaacaactgcgtctttccttcaagccagtaatgcagaaattccttcatgatcatgttgatctacaagttagtgccctctatgctcttcaggtgcactgctacaacagcaacttcccaaaaggcatgttactccgcttttttgttcacttctatgacatggaaattattgaggatgaagctttctgggcttggaa

SEQ ID NO: 13944 - DNA, 224 bp, Bos taurus
  Clone ID: 60-BOVMS1-014-Q1-E1-G8
cggcaacatgactgccaaggatcgtatcactactcttggaccgttttagcaacgtacatgcaaaagattcagtgcacaacgttttatcacaaaccagattgtgacgataggaagaatctagtagtagatatcactgcatgataacctgagagatggaaagtttatggatctcttatacaagccctgttgcttgatggctcactcacgaaaagctgaacgtgagt

SEQ ID NO: 13945 - DNA, 453 bp, Bos taurus
  Clone ID: 60-BOVMS1-016-Q1-E1-G8
attgatgaaggaaaagttttaacagtagcctgcgcttttacgggtgagcctaccccggaaataacatggtctcgtggtggaagaacaattcacgatcaagaacagcgagggcgattccatattgaaaacacagatgacctgacgactctgatcatcatggacgtacggaaacaagatggtggactgtataccctgagtttagggaatgaatttggatctgactctgctactgtgaatataaatattcgatccatttaagagggcctgtgctctcacactcagactcattcttaacctttcccaaatgattcacatggactaatctttctatctttctgatctgtaaatacttaaaaaaaagagtagttttgtatcaacctaaatgagtcgaagttcaaaaataatacatttcagtcttttcataattgttgacctaagaagattacacatttt

SEQ ID NO: 13946 - DNA, 413 bp, Bos taurus
  Clone ID: 60-BOVMS1-017-Q1-E1-G12
ggtgactctagtgtgcctgtatggagtggagtgaatgttgctggtgtctccctgaagaatttacaccctgaattaggcactgatgcagataaggaacagtggaaagcggttcacaaacaagtggttgacagtgcttatgaggtgatcaaactgaaaggctacacatcctgggccattggactgtcagtggccgatttggcagaaagtataatgaagaatcttaggcgggtgcatccgatttccaccatgattaagggtctctatggaataaaagaggatgtcttccttagtgttccttgcatcttgggacagaatggaatctcagacgttgtgaaagtgactctgactcatgaagaagatgcctgtttgaacaagagtgcagatacactttgggggatccagaaagaactgca

SEQ ID NO: 13947 - DNA, 299 bp, Bos taurus
  Clone ID: 60-BOVMS1-018-Q1-E1-G12
ttcaaatccccaaaaaaaaaaaaaaaaaaaaaaaaaaaaaaaaaaaaaaaaaaaaaaaaaaaaaaaaaaaaaaaaaaaaaaaaaaaaaaaaaaagggaagaaaataaaaaggaattaggggttaagtaaaaataaatgaaaaaataataaatgttgtataaaataaaaaagggggggtttcctgagggttttaattttaatttcgggttggtggaaattttttagtttttcaaggtttttcccaatttatattttaggggttttgtttttaaaagttttaacggggaaaaccctggggt

SEQ ID NO: 13948 - DNA, 385 bp, Bos taurus
  Clone ID: 60-BOVMS1-018-Q1-E1-G8
cctcgaggcctcctgcaccccactccggcccccggccaagccgccgctgtccagtcacttcgctgctactcccatgggtcacatgagacagacgaggagtttgatgctcgctgggtgacatacttcaataagccagatattgatgcttgggagttgcgtaaagggatgaacacacttgttggctatgacctggttccagagcccaaaatcattgatgctgctttgcgggcatgcagacgtttaaatgattttgctagtgcagttcgcatcctagaagttgttaaggacaaagcaggacctcataaggaaatctacccctatgtcatccaggaacttagaccaactttgaatgaactgggaatctccactccagaggaactgggcc

SEQ ID NO: 13949 - DNA, 120 bp, Bos taurus
  Clone ID: 60-BOVMS1-019-Q1-E1-G8
aaaaaaaaaaaaaaaaaaaaaaaaaaaaaaaaaaaaaaaaaaaaaaaaaaaaaaaaataaataaaaaaataaaaaaaaaaaaaaaaaaaaaaaaaaaaaaataaaaaaaaataaaaatcg

SEQ ID NO: 13950 - DNA, 319 bp, Bos taurus
  Clone ID: 60-BOVMS1-020-Q1-E1-G12
atgcgacgtcatagctcttctatagtgtcacctaaattcaattcactggccgtcgttttacaacgtcgtgactgggaaaaccctggcgttacccaacttaatcgccttgcagcacatccccctttcgccagctggcgtaatagcgaagaggcccgcaccgatcgcccttcccaacagttgcgcagcctgaatggtgaatgggacgcgccctgtagcggcgcattaagcgcggcgggtgtggtggttacgcgcagcgtgaccgctacacttgccagcggcccagcgcccgctcctttcgcttccttcccttccgttcccg

SEQ ID NO: 13951 - DNA, 418 bp, Bos taurus
  Clone ID: 60-BOVMS1-020-Q1-E1-G8
tctcttcccggtgaggggaggaacccagctggaaagcactacaatcatggtcaagttcccaacaagtcaacttgtgaatggataatcaggagacacaaggaaaccaaaagacaaactcaaggaaaaaacaaacagatggggtctgtgactggatcttctatcattccaattctaaatccaacttgaatatatatattcctggacttacaaaacgccaagggggtgactggaagttgtggatatcacggtataaattacatctgagagttgggggggagggaagaccagaaccccttgagaattgttttgatgcaatataagcctaaagatcaccttgtactctgtttgccttctaaaagccattatgacgatcttagaagaagatgaagaaattcaggtacagaaaatggtgtttaat

SEQ ID NO: 13952 - DNA, 438 bp, Bos taurus
  Clone ID: 60-BOVMS1-021-Q1-E1-G8
aaaaaaacacaaaaaaaaaaaaaaaaaaaaaaaaaaaaaaacaaaaaaaaaaaaaaaaaaaaaaaaaaaaaaaaaaaaaaacaaaaataaaaaaataaaaaacaaaacaaaaaaaaaaaaacgggtggccccccaaaaggatcaaaccttatgtaccctttaatgaaacttaaaattccttcaaaagggtcaccaaaattcaattcacgggccgtcctttaaaacacacctaacgggaaaaaccctgaggttaccaaccttaacccccatgcacaaaatccccctttcacaatcgggcttaaaagacagtaggcccgaacctatcgcccttccaaaaatttgcccaccctaaatggaaattggaaccccccccgtaacggacaattaaccccgccggtttagctggtaacccccagcttgacccccacacttccaacc

SEQ ID NO: 13953 - DNA, 392 bp, Bos taurus
  Clone ID: 60-BOVMS1-022-Q1-E1-G12
attttctgatgatgtcacactcaaaattatcatgacttaaatattaccagaacaaagtgtaacggccaacactttgttcgctcatttcacactgtctctgaccatagagagtgcctgggtagcttggaaaagtaacatcacctggccatcccctcagttaaccaagttattcatgcattcctatgccagagcagtgtcaactcttggaggttcaggggtgcagccaacgccttcgtgtggtagttctaaatttaaaccagaaactggggcaactaagcaatgagccacagcagaaaatacagaacaaaataaagctgtcgttaaatttaaaaacaacaaaatattactaactgcccaaaatatcaatttgatgtagttcttttcatgcaagt

SEQ ID NO: 13954 - DNA, 445 bp, Bos taurus
  Clone ID: 60-BOVMS1-022-Q1-E1-G8
gtacattcaggttgtctaccttcacaacaacaatatctctgcaatcggctctaacgacttctgcccacccggatacaacaccaaaaaggcttcttattcaggagtgagccttttcagcaacccagtccagtactgggagatccagccatccaccttccgatgtgtctatgtgcgtgctgccgttcagcttggaaactacaagtagctcccaagaaaaccctcatttttataacctggcaaaatcccattaatgtcattgctcagaaaaacaagaaaacagaataaaaagaaaactagatactggaaatctatctgcaatgtggatgtttttcccacatgacttattatgcataaagccaaatatgcagtttaagtaattgcctacaataaaaaaatattttgcctgccattttcagaatccttttttgaagcttattattgatgt

SEQ ID NO: 13955 - DNA, 427 bp, Bos taurus
  Clone ID: 60-BOVMS1-023-Q1-E1-G12
caccatgtctgctagccatttaggtaagggtagggcacttttaatttaaatgacttcttgcaccatcttgcctaatggactagattggactgtgtcaacattgatttactccactttttatgccttccattgtgatgacgtcaaacacagtgaaagccttcagtcatgcttatgggatttaattgtgtatcctcattactgtatcatttgtggggtacacccctcctccccttttttaaattaaatacagctcattcttactgtggcttgtagcattcctcctctctggctcctggactcttcccctccatctcttccccttgcccctccacccagtcttggtggtggtataaaaaggaaagaacgaaagcacacgagtcagtttggggtcagtggtaaagggggtacatgttgcgaacaaatgttt

SEQ ID NO: 13956 - DNA, 127 bp, Bos taurus
  Clone ID: 60-BOVMS1-023-Q1-E1-G8
ccacgcgaccgcacacgcgtccgaaaatgacaatttccccttatgaaaaaaataacttttctaccaacaatagtcgtattatctaccataatactaccactcacgccaatactatcagtgttagaat

SEQ ID NO: 13957 - DNA, 365 bp, Bos taurus
  Clone ID: 60-LIB188-001-Q1-E1-G12
acaatcgaatgtcccagcagggctgtgagcctgtgaggacggaactggctctcccaaggacaaagtcagcaaaagcctgtgcgcgttttgtcccaaaccagaggaagagaagagtctgagccagcctaggccttgctggtttgaacctgatgaaactctggaaggttaggaatgtctgacaatccttttgcagccacaataccctctaataataacaaagaggcctctccatgaaattctgttcacagcagaggtgtgtgtggttgactttcacagggcaacggtgtttggaattagagtttgactcttcagctacaaaagttacatgttttacacaagaggttagtaggaatatagttagcttt

SEQ ID NO: 13958 - DNA, 308 bp, Bos taurus
  unsure (8): unsure at all n locations; Clone ID: 60-LIB188-001-Q1-E1-G8
tgctcaangagccatggccgcgcgatacctggaagtcagctacgtggacgacacgcagttcgtgcggttcgacagcgacgcccggaatccgaggatggagccgcggacgcggtgggtgaagcaggaggggccggagtattgggatcggaacacgcgaaacgccaagggcaacgcacagagtttccgagtgggcctgaacaccctgcgcggctactacaaccagagcgaggccgggtctcacaccctccagtggatgtctggctgctacgtggggccggacgggcgtctcctccgcgggttcatgcagt

SEQ ID NO: 13959 - DNA, 420 bp, Bos taurus
  Clone ID: 60-LIB188-002-Q1-E1-G12
gccatgggcgcgggatacttcattgtggaagagttagcactaagcaggaaacctttccatgctgtgaagaagctgggacagaaggttcttccttgagtgtgaccatcttcacttcagctcaggagccctgttggctgaagtgtagggcgtcctttctgattcctgaagtagatgaagagccccaccgcaaggaagagcagacccagaacgaagcccccgactccactcatcatcttgctctgagcagagtcagaccgtgccctccattctactgtgatagggcttgtctggctggggtgctccacttggcaggtgtagacctctccactctgaggaactgtttcaagcatcaccatggtctggaaggtccagtctccattctggattaggcctgtggagatcaccccagcctcctcttca

SEQ ID NO: 13960 - DNA, 438 bp, Bos taurus
  Clone ID: 60-LIB188-002-Q1-E1-G8
cgccctggccgcgggatacaaggagcctgtactcggtcctgtccggggacccttccctattattgtctaagaggatttcaaagtgaatgccccctcctcacttttgaattgactgcgactggaaatatggcaacttttcaatccttgcatcatgttactaagataatttttaaatgagtatacatggaacaaaaaatgaaactttattcctttatttattttatgctttttcatcttaatttgaatttgagtcataaactatatatttcaaaattttaattcaacattagcataaaagttcaattttaacttggaaatatcatgaacatatcaaaatatgtataaaaataatttctggaattgtgattactatttctttaagaatctattccctaaccagtcatttcactacatgaatccttacgcacaaaagggaaa

SEQ ID NO: 13961 - DNA, 447 bp, Bos taurus
  Clone ID: 60-LIB188-003-Q1-E1-G8
gatacacatctagactttagaaaaagatcactagccagtcctccatcttccctcctgaaattctttgcagactttgtttcttggtagctgtagacattaagaagttttcctaaatacaggattatgatttcttcatgagtgtggtgttagctgcctgtatttggaacaatttcaggctcattctgtttccctaatttatttaagatgaaagtgaagttgctcagtcatatccgactctttgcgaccccatggactgtagcctaccaggttccaccgtccatgggatttttcaggcaagaatactggagtgggttgcatttccttctctaagagatccttcccgaccaagggattgaactcaggtcccatgcattaaaggaaaaaatttactggccggacccacaagggaagtcctttatttaagatgggcccctctctaataaaaat

SEQ ID NO: 13962 - DNA, 413 bp, Bos taurus
  Clone ID: 60-LIB188-006-Q1-E1-G12
gcgacgggcgcgggatacaagtgaattcagtggcacaagttatttaaatctgtgcttctaactggggaaaagaaaaattcccaccaaattcaaaatactgtgccatgtgatatgcaaacgaatagtccgtcaaccccagacactggtttgaagaaattgagacttgatcataggactgtattagtgcacagcaccagcatgtatgctaggagcagtgggaggaggccagtacaaagccttgtcatctttaggggtagtgatgtgactgctatttggagtgtcactgaaaaggaaaactttagcatgctcactgatctgcctatagctccagcaacagctcggatgtgcgttctccagccatcatgaggctgagtcaagttcgtctctaagtcagaacaacagattcagctatg

SEQ ID NO: 13963 - DNA, 375 bp, Bos taurus
  Clone ID: 60-LIB188-006-Q1-E1-G8
gggctacacgcgcagcaaacactgggctgtcggacacttaatgggaaaaaagattgtggcagattccccacaacttcatgaggaggaaaccttgatggacaactgaaggaatatggccaatgatttgcaacactggtgaaaatggatatgaagacttgagagtctacagcacagggtgcatgccatttacattgctcatctcccaccatacatctgaaaacatcaaaggcacttatcaaaacgattaaataaaggagtgtggaatttaaaacaatgacacataccccaggcagaggatcaagtgcttgagttttcttcgagtctgatttctgacatttgactgatttatgcaatttactttgtagccctaaaata

SEQ ID NO: 13964 - DNA, 363 bp, Bos taurus
  Clone ID: 60-LIB188-008-Q1-E1-G12
gccatgggcgcgggataccagagaagcctccctgggaggtggcggtggcggcaaggtccgcatcaacgttgaggagtctgtggacgggaaggtggtttcttccagaaagagagaaatctaacagcccagtgcaggggagatgcccctgccacccctgccctccccaggctgagcagaaagctggccaaagggaccggaaaagcaaattccaggctctgctttcagagggtctggtccaaggggtccttcgtttcttaattgggtgcttcccgtgctctcccctgctccctccagctttcctgcctctgatagagcagggaggtgcaagaaacagctgtattgtgtaacaagttcatggtctgt

SEQ ID NO: 13965 - DNA, 379 bp, Bos taurus
  Clone ID: 60-LIB188-008-Q1-E1-G8
cgggatacttctcattttcatcccttcaaagctttctttcagcataggttccttttgttcatcctcctcctcttcctcagacaatggtgaaaaggcaaacctttggttattcgctgatggtcgccagagaaccatgatgacaaaaaggatcatggagaatagcaaccgccaaatggcatcatccacccacagctcccgccaatccgactgacaagtcactatcctgaacttcatggttgtccagatgataaacacaatagatgctgccactgccaagataagtgtgttggtgaaatgtcgatacaaagagagttttacgatgttcctcctaagttttaatagcttcattgtttgagtcaggctaataaatatccaccag

SEQ ID NO: 13966 - DNA, 413 bp, Bos taurus
  Clone ID: 60-LIB188-009-Q1-E1-G8
accttgccgtggcagttgtcaagaaagcaaatgaggggctcacatggaattctctgaaagacaagaagtcgtgccacaccgccgtggacaggactgcaggctggaacatccccatgggcctgatcgtcaaccagacaggctcctgcgcatttgatgaattctttactcagaactgtgcccctggggctgactcgaaatccagactctgtgccttgtgtgctggcgatgaccagggcctggacaagtgtgtgcccaactctaaggagaagtaccggctggggcatggcaggcggctctggcttcccagccttctgttcagagatgggggtggtgggcagtatctcatctttgggttccacaatgctcacgtgatcaggcagaggcttcttagggccaatcttaccagtcgggtc

SEQ ID NO: 13967 - DNA, 411 bp, Bos taurus
  Clone ID: 60-LIB188-010-Q1-E1-G12
acttatgttattaggactaaagtctggatcatttatattttcctgtaagaggcagactgctttcaccctttttaaaaagcttcatttatattaaattgataaccatattaccttaatcggaaccttagccttgaaattgtgaactcctagaagtgttattaatcaagtttgctaccaagttaaaccaaaaaaaattataatggttgtaatcaaaagattaatgaataataaacatatctgtcttcctgaatttctcatgggtgtatgtctagaaaacttacttgatttacgtattgaacaagaatatatttttttcaggctaatcagttgacagtgttatcagttgacaactgaattgtcaaaagttattaaaagttgacttttggttgaaaagcatgaaataacaacact

SEQ ID NO: 13968 - DNA, 444 bp, Bos taurus
  Clone ID: 60-LIB188-011-Q1-E1-G8
gccatgggcgcgggatactttgcaaaggccctggggccactggagagctttgaagcctggcctgatgacttgctcatcagcacctaccccaagtcgggcaccacctgggtaagcgagatcctggacctgatctaccaggagggtgacctggagaagtgtcagagagcccctgtcttcttgcgggtgcccttccttgagttcagcgcccctggggttcccacaggtgttgagcttctgaaagatacaccagccccacggctcctcaagacacacttgcctctggccctgcttccgaagaccctgctggatcagaaagtcaaggtgatctacatcgcccgcaacgccaaggatgtggccgtctcctattaccacttctatcgcatggccaaggtgcaccctgaccctggcacctgggacagcttcctggagaagttcatggccggg

SEQ ID NO: 13969 - DNA, 382 bp, Bos taurus
  Clone ID: 60-LIB188-012-Q1-E1-G12
ctggggttttatgttaaccatggcttcctggtgactcagatggtaaagaatccacctgcaatgcgggagacctgggttgggaaaatcccctgaagaagggaaaagttacccactccagtattcttgcctggagaatccccatggacagaggagcttagtggacttcagtccatggtgtcacaaagagtcggacatgactgagcgactaagcacagcacacaaagggaaattgggctttagagttgactcttgtgtcagttaccactttttttttgtaaatgctatctaccttcccttcaagggctgtgtgtgtgtgttttgtttttaaagatgactgagtaactctgctgctctgaatttgcttctttagcacactcattgt

SEQ ID NO: 13970 - DNA, 425 bp, Bos taurus
  Clone ID: 60-LIB188-012-Q1-E1-G8
actcagaggtgtgatgctcgccaggccccagccctggtgctgggaggggcggagctgcctcgcaatccgcttctttgctttggcccccgtggcctgggtgaaccacctggctgacttcaggaccatccgcttgtgtccccctcgctggcctgcttttcctgtggggcctgggagatgctcacaatgggtcaacccttttaggctgaatgattccttgggtctcgaaaattcagtccaacagcccttggcttctttcgatcggctctgacactggtctacatgactggtctttctaaagtcagtgagtttggttatgtaactctcaacttgaccagttttactaaggggctgacaaatcaaaaacacacttgtcagttcggtgaaaataatgtggtcaaacaacgaagtccattgcattgatttgt

SEQ ID NO: 13971 - DNA, 397 bp, Bos taurus
  Clone ID: 60-LIB188-014-Q1-E1-G12
acagctctctgttgttgggcaggtcatagttaatgatgaggggcacctggggcacatccagcccccgggcccagacgtcggtagagatgagcactcggctggcacctgaccggaactccttcatgatggactctcgctccttctggggcatgtccccgtgcatggacgacacggtaaggttagcttccctcatcttctccgtcagccagtcaaccttcctcttggtgttacagaagatgacagcctgtgtgatggtcagcgtgtcatagaggtcacacagggtgtcaaacttccactcttcccgttccacagccacaaaaaactgcttgatgccttcgagagtcagttcatcacgttttaccaagatgcggatggggtcggtcattaacttgttggt

SEQ ID NO: 13972 - DNA, 401 bp, Bos taurus
  Clone ID: 60-LIB188-014-Q1-E1-G8
gccatgggcgcgggatacttatgatcggccagcccaccgggcactttgacaagcttgttgttgttcaaatgaagttccctcaaatgaggagtgttggccaaagagccattgtcaaccgcagagatgctgttgaaactcagtcccaacttagccaaattattcagtcctttcaggctagctgcatcaactttggtgattttgttgccatcgagatgtaattcagtaagggaaggaggaagaccttgagggatggtagttatatttgtgtcagcaatgcggatgtaggagagcttcttcattccctgaaaggctccattttcaatgcctgagctcttcagcgggttggtgccaagttctacgacgatcatctggttcaatccattgaacacagactttcgcac

SEQ ID NO: 13973 - DNA, 165 bp, Bos taurus
  Clone ID: 60-LIB188-016-Q1-E1-G12
acataatttacacaaaagcgatcacctcccctgtgtggactcgggcgaggactggccccttctccttagagagaagcggggtggcttttgggaaggcaaaggacttcctgtaacaatgcatttcgcgatatttggaatgactattaaaaaaaaacaaaaccatgt

SEQ ID NO: 13974 - DNA, 404 bp, Bos taurus
  Clone ID: 60-LIB188-016-Q1-E1-G8
accagctgtctcttcaagatcactactaactagctcttccttggaaaaagatttctttttcttgggtttggaaaaagacacagaagggtcttccattccattctcctgaagaacctcctggggcttttgctttttcttctttttgggtctttcacttgtctcctcacactcctccggggcactgctattttctgaagaagccagggcaatcgcagccagccttttcttttccttcttcaagcgtttcttctcctgtttctcgagcttcctagtaatctcagcagccgcttcctctgcctgaaccattgcctccttcatgacatccagattctttcggggaatctctccagtctcatagaaggacagccgctcctcaacttgtttcccaagctttcccccaaaaa

SEQ ID NO: 13975 - DNA, 424 bp, Bos taurus
  Clone ID: 60-LIB188-017-Q1-E1-G8
gcgggatactggcgaaactttttgcagtcatgcttacatcgactcttggggccaaggacacttggtcaccgtctcctcggcctccaccacagccccgaaagtctaccctctgagttcttgctgcggggacaagtccagctccaccgtgaccctgggctgcctggtgtccagctacatgcccgagccggtgaccgtgacctggaactcgggtgccctgaagagcggcgtgcacaccttcccggctgtccttcagtcctccgggctctactctctcagcagcatggtgaccgtgcccggcagcagctcaggacagaccttcacctgcaacgtagcccacccggccagcagcaccaaggtggacaaggctgttgatcccagatgcaaaacaacctgtgactgttgcccaccgcctgagctccctgga

SEQ ID NO: 13976 - DNA, 432 bp, Bos taurus
  Clone ID: 60-LIB188-018-Q1-E1-G12
actcagtgtaaggctgacggtttacttgctgcaagccgtgtatcgtgcagttacattctcccagttgatcacattccaaatggccttcaggtaatcgggcctgacatttttatactgaaggtaataagcatgctcccacacgtcaatccccagcagggggataagacctgttgttccttgcaggggatcctggttagaacaagcagcaatctgtaagcgtccctgctccttattgaagccgagccaaccccaaccggagccttggacaccaacagatacagcagtcaacttttccttaaatttggcaaaggaaccaaagtcacgtttgatggcttccagcaattccccttggggttctccaccaccgttagggctcagatttgtccagaagatgctgtgattgatatggcccccaccgttgaacttcaacgc

SEQ ID NO: 13977 - DNA, 411 bp, Bos taurus
  Clone ID: 60-LIB188-018-Q1-E1-G8
gtgaaaagggccggcggatccgggaattgactgctgtggttcagaagagatttggcttccctgaaggcagtgtagagctttatgctgaaaaggtagccacaagaggactgtgtgccattgcccaggcagagtctctgcgttacaaactcctaggaggccttgctgtgcggagggcctgctatggtgtgctgcggttcatcatggagagtggggccaaaggctgcgaggtcgtggtgtctgggaaacttcgaggacagagggctaaatccatgaagtttgtggatggcctcatgatccacagtggggaccctgttaactactatgtggacaccgccgtgcgccatgtgctgctcagacagggtgtgctgggcatcaaggtaaagatcatgctgccttgggacccgactggta

SEQ ID NO: 13978 - DNA, 429 bp, Bos taurus
  Clone ID: 60-LIB188-019-Q1-E1-G8
gggatacgggataacgggaggcgctggagaagggtgatgttacagctcagatagctctgcagcctgcgttgaagttcaacggtgggggccatatcaatcacagcatcttctggacaaatctgagccctaacggtggtggagaaccccaaggggaattgctggaagccatcaaacgtgactttggttcctttgccaaatttaaggaaaagttgactgctgtatctgttggtgtccaaggctccggttggggttggctcggcttcaataaggagcagggacgcttacagattgctgcttgttctaaccaggatcccctgcaaggaacaacaggtcttatccccctgctggggattgacgtgtgggagcatgcttattaccttcagtataaaaatgtcaggcccgattacctgaaggccatttggaatgtga

SEQ ID NO: 13979 - DNA, 434 bp, Bos taurus
  unsure (408): unsure at all n locations; Clone ID: 60-LIB188-020-Q1-E1-G12
gccatgggcgcgggataccggctgaggcatggcaggcggctctggcttcccacccttctgttcagagatgggggtggtgggcagtatttcatctttgggttccacaatgctcacgtgatcaggcagaggcttcttagggccaatcttaccagtcgggtcccaaggcagcatgatctttaccttgatgcccagcacaccctgtctgagcagcacatggcgcacggcggtgtccacatagtagttaacagggtccccactgtggatcatgaggccatccacaaacttcatggatttagccctctgtcctcgaagtttcccagacaccacgacctcgcagcctttggccccactctccatgatgaaccgcagcacaccatagcaggccctccgcacagcaaggcctcctangagtttgtaacgcagagactctgcct

SEQ ID NO: 13980 - DNA, 395 bp, Bos taurus
  Clone ID: 60-LIB188-021-Q1-E1-G8
cgggatacacttacaggcaccacactcgcagacgccgcggccattgcagatctgtccattcacggccatgcaggaagcggtatccagagaacagtcacaggcgctgccggtgtagttagggttgcactcacacactcgacacttgcaaacaccatttcctccacatattaagccattggatctatcacagttgaaattatcacactcgcagaatttgccagaataaatttcatttgtattgtccctcttcctacacacacactgtccacagacacactctccattgttgctacagatttctgaactgttttctttcctgcagtaggcatccatgtcttcgctgttcacctcatctgtgctacattcacagtgtctcccgacacgtccctcgttgc

SEQ ID NO: 13981 - DNA, 375 bp, Bos taurus
  Clone ID: 60-LIB188-022-Q1-E1-G12
accagctgtctcttcaagatcactactaactagctcttccttggaaaaagatttctttttcttgggtttggaaaaagacacagaagggtcttccattccattctcctgaagaacctcctggggcttttgctttttcttctttttgggtctttcacttgtctcctcacactcctccggggcactgctattttctgaagaagccagggcaatcgcagccagccttttcttttccttcttcaagcgtttcttctcctgtttctcgagcttcctagtaatctcagcagccgcttcctctgcctgaaccattgcctccttcatgacatccagattctttcggggaatctctccagtctcatagaaggacagccgctcctc

SEQ ID NO: 13982 - DNA, 398 bp, Bos taurus
  Clone ID: 60-LIB188-023-Q1-E1-G12
ggcggccggatacaaaagctacgtcccccagagctctgttgcaacaaaggtcagacacacctcaggtccccctcaaggaggcccccccatgccctggcatccttacacaacgaaagtcacatggacattgcaggtttagcacaagttgccaacagcactttattttttcttttcaacatcctgttctgcggcttccttggcccttttcgcccggatgccaaagagccgggcattggcgcgggccatgcggaaactggcaaatgccttaaagttcttctcctcctctgtgaagacactggctttcaccttcttatagacgttccgtaagggcataacaggtccggtcagctgacttgccagtttaagctcttcagcacagctgtctcgcttcttggggg

SEQ ID NO: 13983 - DNA, 326 bp, Bos taurus
  Clone ID: 60-LIB188-023-Q1-E1-G8
catggccgccggataccaaatcaaatatgaggagctgcagacactggctgggaagcacggggatgaccttcgtcgcacgaagacggagatttctgagatgaaccggaacatcaaccgtctcaaggctgaaatcaagggcctcaaaggcaaaaggcgttccctgaagcggtcaaccctctaactcaacacagttgtgaaaaggctgttaaggatgctcaagccaaactggccgagctggaggccgctctgaggaaccccaagcaggacatggcgcgggaactgcgccaattctaacgggcgcccgggcacgtcccggacacgtgtct

SEQ ID NO: 13984 - DNA, 396 bp, Bos taurus
  Clone ID: 60-LIB188-024-Q1-E1-G8
actcctattacaacctggatgaaacttgtatccgcttctatcacccggataaagaggacggaatgctgagcaaactctgccacaaagatacctgccgctgtgcagaggagaaccgcttcatgcaccacacagagaaggaggtcactctggaggaccggctggacaaggcttgcgagccgggcgtggactatgtgtacatctctttcgcacgtcgccacggtgaagggcgacttccgtaacagaactgccaccgtcttggctacagacgtgtttaatgaacattataatcaatttggagaaagaacacactccacccacgccactaccttcttcctccgagggatacagacagcacagaacttgtctcctgtagaacaacttcaagggatcaataag

SEQ ID NO: 13985 - DNA, 428 bp, Bos taurus
  Clone ID: 60-LIB188-025-Q1-E1-G8
cgccatgggcgcgggataccttttgaccccatggaaaaaaatatctaacgttcagaactaccaataacaggaagaagagaattttttttttttttttttttaaagaatgaaatgtttcccatcatagtggattcttaagcacgttctccacgtatgcggcgtgctagctggatgtcttttggcataattgttacacgtttggcatggatagcacacaggttggtgtcttcaaaaaggccaaccagataggcctcacttgcctcctgcaaagcaccaatagctgcactctggaagcgcagatctgttttgaagtcctgagcaatttcccgcaccagacgctggaagggaagtttgcgaatcagaagttcagtggacttctgataacgtctaatttcacggagtgccacagttcgagcggccgcccgggc

SEQ ID NO: 13986 - DNA, 418 bp, Bos taurus
  Clone ID: 60-LIB188-026-Q1-E1-G12
gggatacattgcaaaggccctggggccactggagagctttgaagcctggcctgatgacttgctcatcagcacctaccccaagtcgggcaccacctgggtaagcgagatcctggacctgatctaccaggagggtgacctggagaagtgtcagagagcccctgtcttcttgcgggtgcccttccttgagttcagcgcccctggggttcccacaggtgttgagcttctgaaagatacaccagccccacggctcctcaagacacacttgcctctggccctgcttccgaagaccctgctggatcagaaagtcaaggtgatctacatcgcccgcaacgccaaggatgtggccgtctcctattaccacttctatcgcatggccaaggtgcaccctgaccctggcacctgggacagcttcctggag

SEQ ID NO: 13987 - DNA, 403 bp, Bos taurus
  Clone ID: 60-LIB188-028-Q1-E1-G8
acggcaatctgcagttctgacactgattacgtaagggttgctgctatcagccttgcccactgtgacttctccaaacccaaggaggaaccctagataaaatgccccaacactgtgatgagagcatccagatgttgccatgagaaaccagaaggcagatcttcacagaagccccaagggctcagtcctgcccagtgttaggagacagggttgttgacaactcctgtctcactgcagcctctagcacttgggcaatcactctccgccttagcactttgttcactgtcctgtgtcagatctctgagctcgctctacccttttctgaaaacgtaggtgtgctgcacgtggtttcattttctgtttttcaattgaaaaccttgtggtggaacaaacactatattttgta

SEQ ID NO: 13988 - DNA, 371 bp, Bos taurus
  Clone ID: 60-LIB2809-001-Q1-E1-G8
accacgtttcataccagtggttatgacacacaagccatagtacaaaacaatgacagcacagaatatggactcttccagataaataataaaatttggtgcaaagacgaccagaaccctcactcaagcaacatctgtaacatctcctgtgacaagttcctggatgatgatcttactgatgacattatgtgtgtcaagaagattctggataaagtaggaattaactactggttggcccataaagcactctgttctgagaagctggatcagtggctctgtgagaagttgtgaacacctgctgtctttgctgcttctgtcctctttctgttcctggaactcctctgccccgtggctacctcgttttgcttctttgt

SEQ ID NO: 13989 - DNA, 487 bp, Bos taurus
  Clone ID: 60-LIB2809-003-Q1-E1-G8
acgaaagctgggtgtggagtgattcgtggctcagtatgggagaggatggtgtttaaagctaattaaaggtgtggttgagcagttttaaaccatatgtgggtgagacgtggccattggccatgagacaatggccaatgaagtggtgatatcactgaaagatgatgcctgaaaatgcctctaaagtggagagattctagataaaagaaagaagacaaccagcaacttgtggaatcaacaaattgaggttggaaagagccctttgcattttgtttaaaattctttcctctttcattctatctgacctcctcaccttctttactccccttgccaattgctcagatccaccctgtatgaatgacttagaaaatctgagacatgggccctaaagctctagggacaagtcagatgtttatcactgcctgagttcacctcattttcctctattatgatgttccctccaagttcctttatgggatttcagccaccg

SEQ ID NO: 13990 - DNA, 488 bp, Bos taurus
  Clone ID: 60-LIB2809-004-Q1-E1-G12
catggccgcgcgatactatagttttattttttttttcttaacaatgttgtatctgtttgtgctgaagaattctactctctaagagaattagaatccactctaaagtctggctctaggggcttttctctgcccacttggataaagatatgtctgtctttacacatgtcatcagaatgtaagcagttttgtagggaataaattcatcagataacctcaggttgtatcagaatcttaagtctttgtgggctcctcacctcatctgtaaagggcagagtaaaaatgaagccctgtattttagaaaagcaaactcaactccgtggattaactgtaggtcacagaaagggaaggaaaaaggagacagctcagggggggtctggacactcaggtggaacagaccccagcccgcttctctgtcctcacgccaacggccacagaggagggactctgctctgactcagattttacaggttttgtttacaccttaaaaa

SEQ ID NO: 13991 - DNA, 433 bp, Bos taurus
  Clone ID: 60-LIB2809-006-Q1-E1-G12
acagcagaaaagcctgaatgggcatatctctctggggatagggcactgctttctggggaacaggcaggactttggactgagaaagggacagcacggactgaggaggaaacacgacagttggaggaagaggctggtgaggctggtgcatccaagactggagcagaggcagaggaaggtgcagattttcaacatcagtgagagtcaggctctggctttcagtaaagggctcaactggatatttagggaagggcatttctttgtgcttaggagccatagcctccttcactttggagactcccattacttcaggctgaaggaaaggcggcaccaccacaggggtttgagtaagaggagggatgttttgtgggaggctgttagggatgggcccagggaagggatagactagagactgtgtctgggcaaaggggtggat

SEQ ID NO: 13992 - DNA, 414 bp, Bos taurus
  Clone ID: 60-LIB2809-008-Q1-E1-G8
tacaacagaaaggcctgaatgggcacatctctctggggatagggcactgctttctggggaacacggcaggcctttggactgagaaagggacagcccggactgaggaggaaacatgacagttggaggaagaggctggtgaggctggtccatccaagaccggagcagaggcagaggaaggtgcagattttcaacatcagtgagagtcaggctctggctttcagtaaagggctcaactggatatttagggaagggcatttctttgtgcttaggagccatagcctccttcactttggagactcccattacttcaggctgaaggaaaggcggcaccaccacaggggtttgagtaagaggagggatgttttgtgggaggctgttatggaatgggcccaggaagggatagactacagactg

SEQ ID NO: 13993 - DNA, 419 bp, Bos taurus
  Clone ID: 60-LIB2809-009-Q1-E1-G8
ccgggatacagcagaaaggcctgaatgggcatatctctctggggatagggcactgctttctggggaacaggcaggactttggactgagaaagggacagcacggactgaggaggaaacatgacagttggaggaagaggctggtgaggctggtgcatccaagactggagcagaggcagaggaaggtgcagattttcaacatcagtgagagtcaggctctggctttcagtaaagggctcaactggatatttagggaagggcatttctttgtgcttaggagccatagcctccttcactttggagactcccattacttcaggctgaaggaaaggcggcaccaccacaggggtttgagtaagaggagggatgttttgtgggaggctgttagggatgggcccagggaagggatagactagagactg

SEQ ID NO: 13994 - DNA, 246 bp, Bos taurus
  Clone ID: 60-LIB2809-012-Q1-E1-G8
actccttggccatggcggccagcgacatctccctgctggacgcccagagtgcccccctgagagtgtatgtggaggagctgaagcccacccctgagggcgacctggagatcctgctgcagaaatgggagaatgatgagtgtgcgcagaagaagatcattgcagaaaaaaccaagatccctgcggtgttcaagatcgatgccttgaacgagaacaaagtccttgtgctggacaccgactacaaaaagt

SEQ ID NO: 13995 - DNA, 376 bp, Bos taurus
  Clone ID: 60-LIB2809-014-Q1-E1-G12
acctcacatagggaataacctttgtcttaggttgaatccatggcttcatagctttctgatgctgataaacagtcttgagatactggggcaaggcgaatttctggtaacgctggctgatttttttcagaaaatttaggcgattcttttcttcttcagtcagtttagttttcttagtgaatacttctgttgattccatgtcaacggtcttctttgaattttcctcactggtggagagctgctctctgttcagagtgggagtaatgggaacagcatttctcttaacctgatcccatgggttcaaaacaattggaccttgatacagatactggagatactgggggaacttctgataaaactgattgatttcattcagtgc

SEQ ID NO: 13996 - DNA, 409 bp, Bos taurus
  Clone ID: 60-LIB2809-014-Q1-E1-G8
gatactgagcaagattaccatggcaacaacacatcatcagtagggtaaaactaacctgtctcacgacggtctaaccccagctcacgttccctattagtgggtgaacaatccaacgcttggtgaattctgcttcacaatgataggaagagccgacatcgaaggatcaaaaagcgacgtcgctatgaacgcttggccgccacaagccagttatccctgtggtaacttttctttttttttttttttttttttttttattttttttatttttttctttttttttttattattttttttttgccttaaaatgtaatttattgaaaataataaagacaaaatctcagttaatgcacacaattatttgatatgatggcacttacaggagaaatgattcaaaggcttttaaaacatt

SEQ ID NO: 13997 - DNA, 410 bp, Bos taurus
  Clone ID: 60-LIB2809-015-Q1-E1-G8
gaaccaagtgaaattgtggaaagcctttcaagcagtgaggaatctattacacgcatcaataagaaaattgagaagtttcagagtgaggaacagcagcaaacagaggatgaactccaggataaaatccacccctttgcccagacacagtctcgagtctatcccttccctgggcccatccctaacagcctcccacaaaacatccctcctcttactcaaacccctgtggtggtgccgcctttccttcagcctgaagtaatgggagtctccaaagtgaaggaggctatggctcctaagcacaaagaaatgcccttccctaaatatccagttgagccctttactgaaagccagaccctgactctcactgatgttgagaatctgcaccttcctctgcctctgctccagtcctggat

SEQ ID NO: 13998 - DNA, 140 bp, Bos taurus
  Clone ID: 60-LIB2809-017-Q1-E1-G8
tccggatgggggatatctctctgctgatagggcactggtttccggggaacaggcatgactttggtcagagaaagggacatgacggactgatgatgaaacatgtttcttgttatgaagatgctggtgacgctggtgcaggc

SEQ ID NO: 13999 - DNA, 367 bp, Bos taurus
  Clone ID: 60-LIB2809-018-Q1-E1-G12
acttggaccgggtcacgcgtgggtcctctccgggctcgggagtcgcatcctcaggagtagtgtagcgagcaaattctggaaagtagtcctcaatcttcgattttccagcaaggactttctcagccagcagatcttgcttgttgaggaacagaatcacagagatggtgcgcagccatctgttattccagatgctcttgaagaggttcagagcctcctgcaggcggttggtctggttgtcctcccgaatgaccatgttgtagctgctgctggcaaccacgaagatgatggcagtcacatcattgaagcattggatccatttgcggcgttcatcgcgctggccgcccacgtcaaacatgtggaagttgac

SEQ ID NO: 14000 - DNA, 422 bp, Bos taurus
  Clone ID: 60-LIB2809-018-Q1-E1-G8
acacggtcactaccgacaaggtgccttgtcctttcccttcagcttttactgtgaaacgctcattttccttagtctcttctgagcgcaggaggctggcagattcccagaggatacgatgcctgaccgcagagttgcggctgggcagttggatggacacatccaggttcagctccttgtgatcaggaacatccttctggtattgggccaaggcttggaacaccatgaaagtggcctgcatggagccataaccacctccatagtatctctgctcgttgagccagcgcacgacaggaggtgtagtgtcgtagtctttacgtgccagcagagccaagaaggcgtaggacgtggcctccacattgtagagcttctggttgggttctcccagcggttcttttctttggctgtgttcagaaatttggtga

SEQ ID NO: 14001 - DNA, 419 bp, Bos taurus
  Clone ID: 60-LIB2809-019-Q1-E1-G12
acaagctttttttttttttttttttttttttgtcttaaaatgtaatttattgaaaagaagaaagacaaaatctcagttaatgcacacaattatttgatatgatggcacttacaggagaagtgattcaaaggcttttaaaacattttccatacagaaatttaatgaagactttaattccctttgactcagtggcctttataccagcatgatactactggaatttaggtaacaagctgttaggacaatttcacttaaggatgttgcactatctaaaatacagtagagaactcaagaagaaagagtgccttcaatttgagattgccctattctaaaacagcagttgaagcctttggatagaatggtttgacatgatagatgaaaagacatgtagagcatggaattttcagaaccatcaaaga

SEQ ID NO: 14002 - DNA, 416 bp, Bos taurus
  Clone ID: 60-LIB2809-019-Q1-E1-G8
acacccagctggaaattgttcccaatagtgctgaggaacgacttcacagtatgaaagagggaatccatgcccaacagaaagaacctatgataggagtgaatcaggaactggcctacttctaccctgagcttttcagacaattctaccagctggatgcctatccatctggtgcctggtattacgttccactaggcacacaatacactgatgccccatcattctctgacatccctaatcccattggctctgagaacagtgaaaagactactatgccactgtggtgaagagtcaagtgaattctgagggactccacagttatggtctttgatggttctgaaaattccatgctctacatgtcttttcatctatcatgtctaaccattctcaaccaaaggcttcaactgctgttttagaat

SEQ ID NO: 14003 - DNA, 343 bp, Bos taurus
  unsure (38),(60): unsure at all n locations; Clone ID: 60-LIB2809-021-Q1-E1-G12
acacaagcgtcaatctgggcatatctctctggggatanggcactgctttctggggaacangcatgactttgcactgatatagggacagcaccgtctgatgatgatacatgacacttggacgaatatgctggtgatgctggtgcatccatcactggagcatacgcacaggaaggtgcagattttcaacatcagtgtagactcatgctctggctttcactaaatggctcaactggatatttagggaacgtcaattctttgtacttaggagccataacctccttcactttgcggactcccattacttcaagctgaatgacatgctgcaccaccatacgggtttgcg

SEQ ID NO: 14004 - DNA, 427 bp, Bos taurus
  Clone ID: 60-LIB2809-021-Q1-E1-G8
acccaaaaggtctaactggttaagttttactaagaggcgcaaaaaaggagccaatttttgacttaacattttaattctacgcgagacaagagcttgtctgggcttacagtcctgtcatctgacagtgagtagcataccagtctttcacatgtcttatactttggaaagcagacccgactctggggcactcgccttaattagattctgaatttccttgaattttggatggtctttatcagccaccagctgtagcagaacagcctcacttgtagtcacaatgatcccggttcgagcaagacgctcaagggcaaacatcctgtccatcatgcttctcgatgatgtggcatccgcgacaatatgaacctcgatacctcggccaacgagctccagagctgtctgctggatgcacacatgagtttctactcca

SEQ ID NO: 14005 - DNA, 400 bp, Bos taurus
  Clone ID: 60-LIB2809-024-Q1-E1-G8
gggatactcataggcagatgggcaaagggatccttggccttcggctcggcagccagcgcctgctcacattcatccagctcctcctcatgagcgggggcagccgccttcttctcctctttgccctccttctgctctgcctggggcttcagcttctcttctcgagaacctttctccttccgtggggtgtcctttttaggctggctctctgcaaactttttagcatcaaactgggccattttctcacagagtttcacctctcccaagacagcccggaactggggctggttaatgcatgtgagggaacagcggttggtattacggaatgcctgtcggaaagaaggctccagaacctgtttgtcaagccacaacagggtgcagacaactgtgatgttagccaacg

SEQ ID NO: 14006 - DNA, 140 bp, Bos taurus
  Clone ID: 60-LIB2809-025-Q1-E1-G8
gggccgggataagaggatcagcagggaggtgatcagcaggatggtgccaacaatagcatctgagaggttgaaattcacgaagatgtgctggcacttggcaatgttctccttgtaggtcacgttcttgatggtccaagtgt

SEQ ID NO: 14007 - DNA, 396 bp, Bos taurus
  Clone ID: 60-LIB2809-026-Q1-E1-G12
acaactaactttggagttgatattaatagaaattattccaaaattattcttaggtcacaaataactactatcccacataaaaagggaaaaatcccacccaattaaggaaaaggtatcctgtgtatgtttccatggcaatgagtttatgcattctcacattttgtccggctagttatccacactttatctgatgcatttattccatctctcacagagaaccatatatattcccgacagcatctacaacacatggctcgcggtggacacacttcatagtggatactgcgactataaaaatactcacaacttatgagaattctacgatgctttataaaaagcattattcatgcctcaaaactgccctttttggtaggtcactattattatccccctttt

SEQ ID NO: 14008 - DNA, 298 bp, Bos taurus
  Clone ID: 60-LIB2809-027-Q1-E1-G8
ggataagcaaaaaggcctgaatgggcatatctctctggggatagggcactgctttctgggaacaagcacgactttggactgagaaagggacagcacggactgaggaggaaacatgacagttggaggaagaggctggtgaggctggtgcatccaagactggagcatatgcagaggaaggtgcagattttcaacatcagtgagagtcaggctctggctttcagtacagggctcaactggatatttacggaacggcatctctttgtgcgtacgagccataccctccttcactttggagact

SEQ ID NO: 14009 - DNA, 430 bp, Bos taurus
  Clone ID: 60-LIB2809-028-Q1-E1-G8
gggatcatggtaccggccgaggtacttcatcatcaggaacagctgcccaaatcaacgtgattccaccatctccgtggaagagaatggggtgtcagcagaaagccggttctcagttcagatgttcaagtttgctggaaattatgacctagctttcctgcattgtgaggtttctctcgggtgatttcattaaagaagagtgccaaccgtcttgctcaagaagtcaactccgcagtgaaggggtggctattgatccagcccgagttctagatctgggacccatcactcgcaaaggtgcccagtctcttggtgtcatgagtggaacacccaacactgcagggttcctggtggcctggcccctggttctcctgcctgtcctcctggctgggctgttctgagagctcagctgggcatctggccttgaagcttgtgt

SEQ ID NO: 14010 - DNA, 349 bp, Bos taurus
  unsure (157),(277),(288): unsure at all n locations; Clone ID: 60-LIB2809-030-Q1-E1-G8
actcaaagaggcatttaacagatactaatcgggcttcccaggtggtgctagtggtaaagaacctgcctgccaatgcaggagacgtaagagatgcaggtcaattcctaggccctggaggagatgacaacccactcctgtattcttgcctggagaatcncatagacagaggaacctggcaggttacagtccatagggtcatacagagttggaaagggctgaagcaactttgcatgcatacatgtctctcaatcatcctgttctctccttaggacaacanatgatctctanatatttcatctggttctaaaagaataatagtcattgaaaatatattattataacacgcatg

SEQ ID NO: 14011 - DNA, 428 bp, Bos taurus
  Clone ID: 60-LIB2809-031-Q1-E1-G12
catggccgcgggaaacctcaaaggaccagagtggctgctccactagcagagaaccccttttgaggtgttgcgatgcacggagggacttggagcttgctattggtggagttctccgggctgagcagcagattacagacaacttgcgagaggtcaaagcccagattcacagctgcataagtcgccacctggaatgccttcgaagccgtgaggtgtggctgtatgaacaggtagatctcatctatcagcttaaagaggagacgcttcagcagcaggtccaacagctctactggttactgggccagttcaattgtcttaatcatcagctggagtgcacccaaaacagagacctagccaatcaagtctcagcttgcctgcagagattgggcagtctgacactcaaacctgaagattcaactgcgttactcttg

SEQ ID NO: 14012 - DNA, 253 bp, Bos taurus
  Clone ID: 60-LIB2809-032-Q1-E1-G8
gccatgggcccgggatacaatgaggaaactgtctgggaaagggagaaccatagccttggctcagaaccttgaggcacagcctgaagacttcctacttaacatctatgaatgctgctttacagtttttctatgccacgggtcagtctggtatgctcagacattggcctcctatacgaaccagtgtgtcatcgtgaaaagctttgcgtgactcagtttgccacatctcaatatgccgtccttgtcacccagtgtg

SEQ ID NO: 14013 - DNA, 373 bp, Bos taurus
  Clone ID: 60-LIB3057-001-Q1-K1-G12
gtgtgagtgacatagcctttaaaccctgcgtggcaatccctgacgcaccgccgtgatgcccagggaagacagggcgacctggaagtccaactacttccttaagatcatccaacttctggatgattatccaaaatgcttcattgtgggagcagacaacgtgggctccaagcagatgcagcagatccgcatgtccctccgcgggaaggctgtggtgctgatgggcaagaacacgatgatgcgcaaggccatccgagggcatctggaaaacaacccggctctggagaaactgttgcctcacatccgggggaatgtgggcttcgtgttcaccaaggaggacctcactgagatcagggacatgctgctggccaacaag

SEQ ID NO: 14014 - DNA, 326 bp, Bos taurus
  unsure (291): unsure at all n locations; Clone ID: 60-LIB3057-001-Q1-K1-G8
cttgaaatcatcaccaccatggtactgcaaaggttcgtcgcagaaagggtcccgcctgctcctgctgctggtggtgtcaaatctactcttgtgccagggtgtggtctccacccccgtctgtcccaatgggcctggcaactgccaggtatcccttcgagacctgtttgaccgggcagtcatggtgtcccactacatccatgacctctcctcggaaatgttcaacgaatttgataaacggtatgcccagggcaaagggttcattaccatggcccttaacagctgccatacctnctgccttcctacccctgaagataaagaacaagccc

SEQ ID NO: 14015 - DNA, 439 bp, Bos taurus
  Clone ID: 60-LIB3057-002-Q1-K1-G8
gcggagacttggtttacgctgaaatgacgacgttagtgctggataacggagcttacaacgccgaaatcggttacagccatgaaactgtctcagttattccaaactgtcagttcagatcaaaaacagcacgtcttaaaacttttactgctaaccagatagatgaaataaaggacccttctggactcttttatattcttccttttcaaaagggctacttggtgaattgggatgttcaaagacaagtttgggattacctttttggaaaagaaatgtatcaggttgactttttagacactaatattattatcacagaaccatattttaacttcacttcaattcaagaatcaatgaatgaaatcttatttgaagaataccagtttcaagcagtattaagagtaaatgctggggctctcagcgcacacaggtatttccgagataa

SEQ ID NO: 14016 - DNA, 335 bp, Bos taurus
  Clone ID: 60-LIB3057-003-Q1-K1-G8
gtttagcaccaggcgccccacgaacgtgcggtgcgtgacgggcgagggggcggccgggtttccggccgtgccccgtgtcccgggacgaagggctcttcgcaccggaccccggtcccgacgcgcggcggtggcgcgccgcgccgtgccccgggggacgcgggcgacggcccgccggcagtgacggcgggggaccggctatccgaggccaaccgaggcttccgcggcgctgccgtatagatccgactgtgcgggattctgacttagaggcgttcagtcataatcccacagattgtagcatcaccccattgactcctcagccaagcacatacaccaaa

SEQ ID NO: 14017 - DNA, 412 bp, Bos taurus
  Clone ID: 60-LIB3057-004-Q1-K1-G8
ctagatcgcgagcggccgcccttttttttttttttttttttttccaaatttaagagttgtttattccacgaacaacattaagcattgtgataatttgtgttaaattctgcgtagaaaagccacagaacattgtaaagaaatggcataaggagaaggaggcgagaaagggttgaaaacagcgattcaaacgaaggcttacgtcatcgggggtgaacttgtgtaccaatgccttcaccgccagccataaggaacaattgacttgtccaatcagaacgggactctctttatatatactggaagaaaggggcagggcttcgtttttccatcagttagctgcttttgggaaatctgtaatggctcgcactaagcagaccgctcgcaagtccaccggcggcaaggcgccacgcaagca

SEQ ID NO: 14018 - DNA, 400 bp, Bos taurus
  Clone ID: 60-LIB3057-005-Q1-K1-G12
gttcgtatgatccgtaataattaccgtcgcactactactactctcgctccctgtattagcagccggcatcacaatgctattaacagaccggaacctaaatacaaccttcttcgacccggcaggaggaggagaccctattctatatcaacacttatgctgattctttggacaccccgaagtctatatgataatcttacctgggtttggaataatctctcatatcgtgacctactactcaggaaaaaaagaaccattcggatatatgggaatagtttgggctataatgtcaatcggatttctaggtttcatcgtatgagcccaccatatattcactgtcagaatagacgtcgacacacgagcctacttcacatcagccactataattattgctattccaacc

SEQ ID NO: 14019 - DNA, 436 bp, Bos taurus
  unsure (6),(309),(403): unsure at all n locations; Clone ID: 60-LIB3057-006-Q1-K1-G8
gagttntattaatcaagataaaagaaaagaaacagaagatgaagataaatcaaaatcaggtatgcagaaacatgaacagaaaattagacattttggtatgttaagtcgatgggatgatagtcagagatttttgtctgaccatccataccttgtatgtgaagaaactgctaaatatcttattttatggtgttttcatctagaagctgaacagaaaggggctctaatggaacaaatagcacatcaagcagttgtaatgcagtttattatggaaatggccaaaaactgtaatgtggatccaagaggatgttntcgcttatttttccagaaagccaaagcagaggaggaaagttattttgaagcattcaaaaatgaacttgaagctttcaagtcaagagtcagactntattctcaatcaccaaattttcagcctgtgaca

SEQ ID NO: 14020 - DNA, 427 bp, Bos taurus
  unsure (288),(416): unsure at all n locations; Clone ID: 60-LIB3057-007-Q1-K1-G8
tgaaatcatcaccaccatggacagcaaaggttcgtcgcagaaagggtcccgcctgctcctgctgctggtggtgtcaaatctactcttgtgccagggtgtggtctccacccccgtctgtcccaatgggcctggcaactgccaggtatcccttcgagacctgtttgaccgggcagtcatggtgtcccactacatccatgacctctcctcggaaatgttcaacgaatttgataaacggtatgcccagggcaaagggttcattaccatggccctcaacagctgccatacctnctcccttcctacccctgaagataaagaacaagcccaacagacccaccatgaagtccttatgagcttgattcttgggttgctgcgctcctggaatgaccctctctatcacctagtcaccgaggtgcggngtatgaaagga

SEQ ID NO: 14021 - DNA, 390 bp, Bos taurus
  Clone ID: 60-LIB3057-008-Q1-K1-G8
cctaccccttttcacatcaaagaatggataactactgacaacgtaggccgcgcctgccgctcccatctgcttgtgtggctggcagggaaggaaaagaacttgcatgttggtgaaggaggaagctgggtgggacgacagtgaaatctagagtaaaaagctggtccaaggtgttctgcgggctgtaaaatgcagtttaatcagagtgccatttttttttgttgttcaaatgattttaattattggaatgcacaatttttttattatgcaaataaaaagttttaaaacctgaaaaaaaaaaaaaaaaaaaaaaaaaaaaaaaaaaaaaggggaacactctataggagccacaggttcgcacacgtgcatatgccaccttaaatctcctatata

SEQ ID NO: 14022 - DNA, 409 bp, Bos taurus
  unsure (394): unsure at all n locations; Clone ID: 60-LIB3057-009-Q1-K1-G12
gtgttaccaccctatggtggagacataccaactctctgtggacacttgcattctaactacatatgcactttaatagcatttattgaagaatggtggtggtttagttgctaagccatatcagactcttgcgaccccatagagtgtagcccgccaggctcctctgtccttgggatttcctaggcaagaatactggagtgggttgccatttccttctccaggagatcttcctgatgaagggcttgaatccaggtctcctgcaatacaggcagattctttacgaatttacggattctttactgagtcaccagggaagccctatgtgactataaatatacacaacgtaataatggtactcttaagtctatcaaacatcgggattttgagggttttcatnctgtgtgtgtgtgtg

SEQ ID NO: 14023 - DNA, 390 bp, Bos taurus
  unsure (357): unsure at all n locations; Clone ID: 60-LIB3057-009-Q1-K1-G8
gtccgcggcaccctggggatggccacaccggcagtaccggcaagcgcgcctcccgccaccccatccgaagccccagctgcggcctcatctccggcctcggccccggtcccggccccagccccagcctcagcctcggccccggctccatcgccggctccggctgcagctccatcgccggctcccgcgtcatcctcagacccggcagcagcagcggctacgaccgcggctccgggccagaccccggcctcagcgccagccccagcgcagacccccgcacaggcttctgtcaggccctgctctcccaggccccttccccggcggccgcgtggtccggctgcacccggtcattttggcctncatcgtggacagctacgagcgacgcaacgaggg

SEQ ID NO: 14024 - DNA, 388 bp, Bos taurus
  Clone ID: 60-LIB3057-010-Q1-K1-G8
ggggttcaagagtgaccacttatcatacactttctcaggagcttggctctgaaggacagggacttgagaggcagaagtgatgagttctgcctggtagctcccagaatctggagaggtggagaggtggggcggagctgattgcaaaggctgcctgaggaggaggtgacctgccccctgtgctctccagggctgtcccagacctacagtccatggacagatccgctatatgcggccaagatgtgcctgaccagggcctgctctggacctgctgggtctgaccctgacaaggacgtgcagggctgggtgagaatgaccgcagctctctttacatttggagctgagtggtggccaagttctgacagcatgacctggacctactgccggcaca

SEQ ID NO: 14025 - DNA, 326 bp, Bos taurus
  Clone ID: 60-LIB3057-011-Q1-K1-G12
aaggcatcctggccctgatgcgggagctggaagatggcaccccccgggctgggcagatgctcaagcagacctatgacaaatttgacacaaacatgcgcagtgacgacgcgctgctcaagaactacggtctgctctcctgcttccggaaggacctgcataagacggagacgtacctgagggtcatgaagtgccgccgcttcggggaggccagctgtgccttctagttgccagccatctgttgtttgcccctcccccgtgccttccttgaccctggaaggtgccactcccactgtcctttcctaataaaatgaggaaattgcatcgca

SEQ ID NO: 14026 - DNA, 417 bp, Bos taurus
  Clone ID: 60-LIB3057-011-Q1-K1-G8
gttctccgcttttcagtgttgttgtttgacgacgttgccctgctcacttcagcctccggcccgccatctccttgagccctaccaccatgccttcaattaagttgcagagctctgatggagagatattcgaagttgatgttgaaattgcaaaacaatctgtgaccatcaagactatgttggaagatttgggaatggatgatgaaggagatgatgatccagtccccttgccaaatgttaatgcagcaatattgaaaaaggtcattcagtggtgcactcaccacaaggatgatcctcctcctgctgaggatgatgagaacaaagaaaaacgaacagatgatatacctggttgggatcaagaattcctgaaggttgaccaagggacactctgtgaacttatattgtcagcgaactatttag

SEQ ID NO: 14027 - DNA, 450 bp, Bos taurus
  Clone ID: 60-LIB3057-012-Q1-K1-G12
cgggtttgccgccgggacacaggtgtcgtgaaaaccaccgttaaacctaagccaaagggggaaaggagaagacccacatcaacatcgttgtcattgggcacgtagattcagggaagtctaccacgactggccatctgatctataaatgtggcgggatcgacaagagaacaattgaaaagttcgagaaggaggctgccgagatgggaaagggctccttcaaatatgcctgggtcttggacaaacttaaagctgaacgtgagcgtggtatcaccattgatatctccctgtggaaatttgagaccagcaagtactatgttaccatcattgatgccccaggacacagagacttcatcaaaaacatgattacaggcacatcccaggctgactgtgctgtcctgatcgttgctgctggtgttggtgaatttgaagccggtatcttcaagaacgggc

SEQ ID NO: 14028 - DNA, 403 bp, Bos taurus
  Clone ID: 60-LIB3057-012-Q1-K1-G8
gccggctggagccagctcccgacccgcagccggagccacgccttgcggcgaaacgctggcgccgcccccgggagggcctgtattgcggatgcctgatgaagtgcaccatggagaggaagaagtggagacatttgcctttcaagcagaaattgcccaactcatgtctcttattatcaacaccttttattcccacaagggaaattttccttcggagttgaacaggaatgcttctgataccctaaacaagaatcgctatgaaagcctgacagaccctttcaaattggacaggggtaaagagctgaaaattgacattattccaaacccccatgagcgtactctgactctggtagacacaggcattggcatgaccaaaactgatcttgtaaataatttgggaaccatt

SEQ ID NO: 14029 - DNA, 426 bp, Bos taurus
  Clone ID: 60-LIB3057-013-Q1-K1-G12
ggaacttcagcacccacgggacggacagcgctctcctccacctggaggagacctgaggcccgagcgcccactgtctaattaatccctttactccggagcccagcagagctccactagacgcagatccccgccactagccctccccgcgcccactctcctagcttttcctgtttttactcctccttttcattcataacaaaagctacagctccaggagcccggcgccaggctgtttccgaagccaagcgtggaagaatgggtttcctttggaccggcacttggaatgtggtattgatgcttcacagcagcccaattcaggctttccccaaaccggcaggtagccaagacaaacccctacataatagagaattgagtgcagaaagacctttgaatgagcagattgctgaagcagaagcagacgagatt

SEQ ID NO: 14030 - DNA, 141 bp, Bos taurus
  Clone ID: 60-LIB3057-015-Q1-K1-G8
cccacattcatcctatccatttctgagatggttcttaatgatccattccctgggaaaggtctctgagctttatagctttgtaatgcatgcttggctctaatgggtttcatcttaaataaaaacagactctgtagcgatgtc

SEQ ID NO: 14031 - DNA, 427 bp, Bos taurus
  Clone ID: 60-LIB3057-016-Q1-K1-G8
aaaaaaaaggaaaagaggaagactggacaaaacaaacaaaacaaaaggggagaaaggaaggaaactgaagaaagaagataatagaccagcaatcgcagcacttacaatcactaattcccttaaggttgaaactgtaatgacgtaaaaagggtcgatggtatttcactgatggtagttcgcagcccctgcaaagtagcctttgttacatgaagtccgctgggaaatagatgttctgtctctatgacaatatattttaactgactttctagatgccttaatatttgcatgataagctagttttattggtttagtatcttgttgtttacgcatggaatcactattcctggttatctcaccaacgaaggctaggaggcggcatcagaggtgctgtgcgtgacagagccatgagccagccattttataagca

SEQ ID NO: 14032 - DNA, 282 bp, Bos taurus
  Clone ID: 60-LIB3057-017-Q1-K1-G8
cggactcgtgggcggacgcgtgggccttgagacatcctgccgggtttaaggccattggggtgaagcctcctcggggaatcctgctctatggacctcctgggactgggaagaccttgattgctcgagctgtggcaaatgagactggcgccttcttctttttgatcaatggtcctgagatcatgagcaagttggccggtgagtctgagagcaaccttcgtaaagcctttgaagaggctgagaagaatgctcctgctattatgttcattgatgaattggatgcca

SEQ ID NO: 14033 - DNA, 292 bp, Bos taurus
  Clone ID: 60-LIB3057-018-Q1-K1-G8
aaagggttcattaccatggccctcaacagctgccatacctcctcccttcctaccggggaggataaagaacaagcccaacagacccaccatgaagtccttatgagcttgattcttgggttgctgcgctcctggaatgaccctctctatcacctagtcaccgaggtgcggggtatgaaaggagccccagatgctatcctatcgagggccatagagattgaggaagaaaacaaacgacttctggaaggcatggagatgatatttggccaggttattcctggagccaaagagactg

SEQ ID NO: 14034 - DNA, 383 bp, Bos taurus
  unsure (354),(373): unsure at all n locations; Clone ID: 60-LIB3057-019-Q1-K1-G12
gaacgaagggaagaaaagtgaccgagaggccgctgaacatcctcgccccggcgcagcgggagccgcccgaggcagcttccccgtgacagagcctcagcctgcctggaagatgccgagactgtgcagcagtcgttcgggcgccctgctgctggccttgctgcttcaggcctccatggaagtgcgtggttggtgcctggagagcagccagtgtcaggacctcaccacggaaagtaacctgctggcgtgcatccgggcctgcaagcccgacctctccgccgagacgccggtgttccccggcaacggcgacgagcagccgctgactgagaaccccccggaagtacgtcatgggccatntccgctgggaccgcttcgncgtcggaatg

SEQ ID NO: 14035 - DNA, 345 bp, Bos taurus
  Clone ID: 60-LIB3057-019-Q1-K1-G8
gccgggttgagaggagcgtggccttctcctctccccgccatggcgtgtgctcgtccactgatatcagtgtactccgaaaagggggagtcctctggcaaaaatgtcactttgcctgctgtgttcaaggctcccattcgacccgatattgttaactttgttcacaccaacttgcgcaaaaacaacagacagccctatgctgtcagtgaattagcaggtcatcaaaccagtgctgagtcttggggtaccggcagagctgtggctcgaattcccagggttcgaggtggcgggactcaccgttccggtcagggcgcttttggaaacatgtgtcgtgggggcccgcattgt

SEQ ID NO: 14036 - DNA, 414 bp, Bos taurus
  unsure (399): unsure at all n locations; Clone ID: 60-LIB3057-020-Q1-K1-G12
gctgtgttgactaccattacttcttcctttgttctctattatgtctgggatggtggctttgcggatccccagaggcctttggacagcagctgtgatggtgaccctggcggtgctgagcaccccagggactgagggcagagactcgccacaggatttcgtgttccagtttaagggcctgtgttacttcaccaacgggacggagcgggtgcggagtgtgaccagatacatctacaaccgggaggagtacgtgcggttcgacagcgacgtgaacgagtaccgggcggtgaccccactggggcggccgtccgccgagtacttcaacagccaggaggacctcctggagcggacgcgggccgaggtggacagggtgtgcagacacaactaccagctggatgcccncttcacctggcagcg

SEQ ID NO: 14037 - DNA, 441 bp, Bos taurus
  Clone ID: 60-LIB3057-020-Q1-K1-G8
gagcttcctggtgaagtgtgtttcttgaaatcatcaccaccatggacagcaaaggttcgtcgcagaaagggtcccgcctgctcctgctgctggtggtgtcaaatctactcttgtgccagggtgtggtctccacccccgtctgtcccaatgggcctggcaactgccaggtatcccttcgagacctgtttgaccgggcagtcatggtgtcccactacatccatgacctctcctcggaaatgttcaacgaatttgataaacggtatgcccagggcaaagggttcattaccatggccctcaacagctgccatacctcctcccttcctacccctgaagataaagaacaagcccaacagacccaccatgaagtccttatgagcttgattcttgggttgctgcgctcctggaatgaccctctgtatcacctagtcaccgaggtacggg

SEQ ID NO: 14038 - DNA, 337 bp, Bos taurus
  Clone ID: 60-LIB3057-021-Q1-K1-G8
tggagaaggaccagcacccgacccgtgggggggctctgatggtggggccccagttagcggacccccggcctctgacccctgggccccagctccggccttctcagacccctggggggggtcccctgccaagcccagcaccaatggcactgcagtggttgggggctttgacacggaggccgacgagttctctgacttcgaccgcctgcgcacggccctgccggcctctgggagcagcacaggggagctggagctgcttgccggagaggtgcccgcccgcagccctggcgccttcgacatgagcggagtcggaggctctctggctgaagctgtggggagc

SEQ ID NO: 14039 - DNA, 436 bp, Bos taurus
  Clone ID: 60-LIB3057-022-Q1-K1-G8
cttggagggagggattaggagccgctggacttttcttttctttcctccctggtctgtggcacggagtccgaattaattggatttcattcaccctagaggaacaaaactgtctgggcagcttcattcagagagattcattgacaccgagaacgagcggctgcagccgggtgcagagggaaccgccggctttacttcggtctcgcctgccccaaccgctatcccggcttgggaaaggcgaggtggactccaaccccgctccgagagcggcggcttcccgcggcgcgctcggcctctgcctgccccgaggggcgtctgataggcaccccgccctctacggcagctcgacccccatgatagatacgctcagacccgtgcccttcgcgtcggaaatggcgatcagcaagacggtggcgtggctcaacgagcagctggagct

SEQ ID NO: 14040 - DNA, 392 bp, Bos taurus
  Clone ID: 60-LIB3057-023-Q1-K1-G12
acccactcgtccgaagccaccatgcaattcatatgaccttgattcttggattagctgcgctccttgaatgaggctctatgtcacttattctgccatgtaccctgcattaaatgagccccacatgctatcctatccagggccatacatattgatgaacaaaacaaacgacttctggaaggcatggacatgatatttggccaggtaattcctgtagccaaagagactgagccctaccctgtgtggtcaggactcccgtcccttcatactaacgatgaacatgcacgttatttccgctttttattaacctgtttcaatgcctgcgcacggatttaagctagattgacacttaccttaaacttctgaattgcatatatatctacaacaacaactgt

SEQ ID NO: 14041 - DNA, 416 bp, Bos taurus
  Clone ID: 60-LIB3057-024-Q1-K1-G8
gcggagtacgacttgactactcgcatcgcgcactttttagatcggcatttagtctttccgttgcttgagtttctctccgtaaaagagatatataatgaaaaggagttgttacaagggaaattggatcttcttagtgataccaacatggtagactttgctatggatgtgtacaaaaacctttattctgatgatattcctcatgctttgagagaaaaaagaacaactgttgttgcacagctgaaacagcttcaagcagaaactgaaccaattgtgaagatgtttgaagatccagaaactacaaggcaaatgcagtcaaccagggatggttcgtatgctgtttgactacctggcatactagcatggttttaggcttgaatatttagatacactgtacaggtattcaaatttccagtttg

SEQ ID NO: 14042 - DNA, 425 bp, Bos taurus
  Clone ID: 60-LIB3057-025-Q1-K1-G8
acctacgcgtccgtgtgtttcttgaaatcatcaccaccatggacagcaaaggttcgtcgcagaaagggtggcgcctgctcctgctgctggtggtgtcaaatctactcttgtgccagggtgtggtctccacccccgtctgtcccaatgggcctggcaactgccaggtatcccttcgagacctgtttgaccgggcagtcatggtgtcccactacatccatgacctctcctcggaaatgttcaacgcatttgataaacggtatgcccagggcaaagggttcattaccatggccctcaacagctgccatacctgctcccttcctacccctgaagattaagaacaagcccaacagacccaccatgaagtccttatgagcttgattcttgggttgctgcgctcctggaatgaccctctgtatcacctagtc

SEQ ID NO: 14043 - DNA, 177 bp, Bos taurus
  Clone ID: 60-LIB3058-001-Q1-K1-G12
ggagtgctagtgatgtttgatggaacataagtcagcacttgttgtcatggctttgattagccaccacactggtctctacctttttgcctcacaaagtattggaactgggctttgaaaggggctcttgccaagttatatctacttgcattaaaaatgctctataagaagttctagctg

SEQ ID NO: 14044 - DNA, 471 bp, Bos taurus
  Clone ID: 60-LIB3058-001-Q1-K1-G8
gtggtctctccatcctcattcgaaaatgtgaaagaaaagtgggtgcctgagataactgaccactgtccaaagactcctttcttgcttgttgggacccaaattgatctcagagatgacccctctactattgagaagcttgctaagaataagcagaagcctatcactccagagactgctgaaaaactggcccgtgacctgaaggctgtcaagtatgtggagtgctctgcactcacacagaaaggcctaaagaatgtatttgatgaagcaatattggctgccctggagccttcagaaccgaagaagagccgcaggtgtgtgctgctatgaacgtctctccagagccctttctgcacagctggtgtcggcatcatactaaaagcaatgtttaaatcaaactaaagattaaaaattaaaattcgtttttgcaataatgacaaatgccctgcacctacccacatgcacttgtgtgag

SEQ ID NO: 14045 - DNA, 383 bp, Bos taurus
  Clone ID: 60-LIB3058-002-Q1-K1-G8
gcggcaaaaaggagaggccgagaagcgctatagcgatcagagtggcgcacaccgtagcggcacggcatggcgggcatggcgaactatatgtcgcttatagggtgagcaagcatgaatgcagtggtcctccgttgtacaacgtactgactgcaaaaacagtgtcgtctccaagatgaatcgacgctctgcatataccgtgttagggccgtttcctaggacacgaaggcccgaccgaacgagctcatcaacagacgtgcaggctgaatggacaatggtacacacactgtaacggtgcattaagcccggcgcgtgtcctggttacgcgtatcgttaacgttacactttgcagcgcccttaaacgcggtgcttttgctttctaagat

SEQ ID NO: 14046 - DNA, 414 bp, Bos taurus
  unsure (117),(136): unsure at all n locations; Clone ID: 60-LIB3058-003-Q1-K1-G12
ctctcatatcgtgacctactactcaggaaaaaaagaaccattcggatatatgggaatagtttgggctataatgtcaatcggatttctaggtttcatcgtatgagcccaccatatatncactgtcggaatagacgtngacacacgagcctacttcacatcagccactataactattgctattccaaccggactcaatagcttcacgccactggcttttcaaccaagcgcgatgaccaattgtgtgaatcaacggttcctctcgtactaggttgaattactatcgcggcgcggtcatcagtagggtaaaactaacctgtctcacgacggtctaaacccagctcacgttccctattggtgggtgaacaatccaacacttggtgaattctgcttcacaatgataggaagagccgacat

SEQ ID NO: 14047 - DNA, 423 bp, Bos taurus
  unsure (391): unsure at all n locations; Clone ID: 60-LIB3058-003-Q1-K1-G8
ggtttctggaggcgaagaacgcggttggccaatcgcaagccagaagatgaaggttctgtgggttgccgtggtggtcgcgcttctggcaggatgccaggcggatatggagggagagctggggcccgaggagcccctgactacgcagcagccccgggggaaggacagccagccttgggagcaggcgctgggccgcttctgggattacctgcgctgggtgcagaccctgtctgaccaggtgcaggaggagctgctcaacacccaggtcattcaggaactgacggcgctgatggaggagaccatgaaggaggtgaaggcctacaaggaggagctggagggacagctaggccccatggcccaggagacacaggcccgcgtgtccaaagagctgcangcagcccaggcccggctaggctccgacatgga

SEQ ID NO: 14048 - DNA, 435 bp, Bos taurus
  Clone ID: 60-LIB3058-005-Q1-K1-G8
gcaggcgcagagatgcagatctttgtgaagaccctgacgggcaagaccatcacccttgaggtcgagcccagtgacaccattgagaatgtcaaagccaaaatccaagacaaggagggcatcccacctgaccagcagcggctgatcttcgctggcaaacagctggaggatggccgcactctgtcagattacaatatccagaaagagtccaccctgcacttggtgcttcgtctgcgaggcggcatcatcgagccttccctccgccagctcgctcagaaatacaactgcgacaagatgatctgccgcaagtgttacgcccgcctgcacccccgtgctgtcaactgccgcaagaagaagtgtggccacaccaacaacctgcgcctcaagaagaaggtcaaataaagctcttgcacctgcttctgctttgcccgctaggcg

SEQ ID NO: 14049 - DNA, 404 bp, Bos taurus
  Clone ID: 60-LIB3058-008-Q1-K1-G12
cgccgcggtttcctgcttcaacagagcttgaacggaacccggctgctcgtcccccgctaccccggccggccactcagagccagccctcgtcaccacttgacagcgccctccgaccggcccaaggtccccgccaccgctccagtgccgctcggccgtcgccgccaccaccaccaccaccgcccgttttcagccgcccaccatgacgaccgcatccccctcgcaggtgcgccagaactaccaccaggactcggaggccgccatcaaccgccagatcaacctggagctctacgcctcctatgtctacctgtccatgtcgtactattttgaccgtgatgatgtggctttgaagaactttgccaaatactttcttcaccaatctcatgaagagagggaacatgctgaga

SEQ ID NO: 14050 - DNA, 245 bp, Bos taurus
  Clone ID: 60-LIB3058-008-Q1-K1-G8
gactagttctagatcgcgagcggccgccctttttttttttttttttttttttttttttgttttttttttttttttttttttttttttttttttacataaaaagggttttatttgcaggggaccgggactctagtcaaacaagccgaaacccatgtattcatatgattcctccgactcttccttaatcgcctccttactctcctacgctgaagactgaacctaaccccaaaacggatcttgcgaat

SEQ ID NO: 14051 - DNA, 434 bp, Bos taurus
  unsure (407): unsure at all n locations; Clone ID: 60-LIB3058-010-Q1-K1-G8
gaaaaggaaagatataagcatctgaatgtagagttccaaagaatagcaaggagagatgggaaagcctttctcagcaatcactgcaaagaaatagaagaaaacaacagaatgggaaagactagagatctcttcaagaaaattagagataccaagggaacatttcatgcaaagatgggcttgataaaggacagaaatgatatggacctaacagaagcagaagatattaagaagaggtggcaagaatacacagaaaaactgtacaaaaaagatcttcatgacccagataatcacgatggtgtgatcactgacctagagccagacatcctggaatgggaagtcaagtgggccttagaaagcatcactacgaacaaagctagtggagatgatggaattccagatgagctatntcaaatcctggaagatgatgctgtaaa

SEQ ID NO: 14052 - DNA, 330 bp, Bos taurus
  Clone ID: 60-LIB3058-011-Q1-K1-G8
ctcgggccgcacgtccccctgcccacttgatggcgagtggttcatcaagatgctgagggcagaggtggagaagctggagcactggtgccagcagatggagcgcgaggcggaggactatgagctgccggaggagatcctggagaaaatccgcagtgccgtgggcagcacacatcttctcctgtcccaaaaggttcagcagttcttccgactgtgtcagcaaagcatggaccccactgcgttccctgtgcccaccttccatgacctggcgggtttctgggaccttctgcagctctctatcgaggatgtgaccctcaagttcctggagctaca

SEQ ID NO: 14053 - DNA, 311 bp, Bos taurus
  Clone ID: 60-LIB3058-012-Q1-K1-G8
ggacggccgagtgcagctgatcaagggccttctggccctggccattcggccttagacacgtcggtggaggaacccgatccccttccccgagacgtttgacggcgacaccgaccggctcccggagtttatcgtgcagacgggcgcctacatgctagtggacgagaacctgttcaccaacgatgccctgaaggtgacgttcctcatcacccgcatgaccgggccagctttgcagtgggtgatcccctacatcaggaagcagagcccccttcttaacgattaccggggctttctggccgaaatgaaccggtgtt

SEQ ID NO: 14054 - DNA, 324 bp, Bos taurus
  Clone ID: 60-LIB3058-013-Q1-K1-G8
gcggccgcccctttttttttttagatctctgtacagcaaaacgcgagtgctgagctcggttttcggagcggggctagcagctagcacgatggtcggctagcaagaggaggatcggttcgacggcatgttgctggccatggcgcaacagcacgagggcggtgtgcaggagctggtgaacactttcttcagcttccttcgacgcataacagacttctttgttggaggagaagaaggcatggcacataagcttatcacacagaccttcaaccaccacaaccagctggcacagaaggccccgcgggagaagcgagctcggcaggagac

SEQ ID NO: 14055 - DNA, 418 bp, Bos taurus
  Clone ID: 60-LIB3058-015-Q1-K1-G8
tgggctggtggtctgcaccacgccaagaagtttgaggcttctggtttctgctatgttaatgacattgtgattggcatcctggagctgctcaagtaccaccctcgggtgctctacattgatattgacatccaccacggcgatggggttcaggaagccttctacctcactgaccgagtcatgacagtatctttccacaaatacggaaactacttcttccctggcacaggtgacatgtatgaagttggagcagagagtggccgctactactgccttaacgtacccctgcgggacggcattgatgaccagagttacaagcaccttttccagccagttatcaaccaagtggtggacttctaccaacccacgtgcattgtgctccagtgtggagctgactctctgggctgtgatcgattgggct

SEQ ID NO: 14056 - DNA, 406 bp, Bos taurus
  Clone ID: 60-LIB3058-016-Q1-K1-G12
gttcatgtttgtgagcatttctttcacatattcactaatagagaaattcattttagacccctagaccctataactaagccaacaagtgataggaagtaagttattaatagttggtaaagcaaatgcagattctgttcactcaaaccatatggttaattaaaaagaacttacagtctcccaaaaagcgaatggaaagaatatcttctttttttctttttgatggcatttggtcacagaataaggcattagagttaagtctaaaccaatctttaagcaacggaaaatagcaacccaagtaatcgtcatataatgaagttgactttggggaatgtcagcctttgacctctccttggccaccattcctcagctaagcataaattcccattcttaaaaagaaacagccaaa

SEQ ID NO: 14057 - DNA, 350 bp, Bos taurus
  Clone ID: 60-LIB3058-017-Q1-K1-G12
caatgaggcaaactcctttgcgccctgctattatcccaagcgggtccagttgttacacagttctgcccagcccagcaggaaagctaggtggggccagagtatctgttaaaaaaccgccgactgcattcttcactgaggagaagtccagtcatctctgggaaagcactactctacatgcctgtattactagacgccatacctttgttataatctaaccgtgagctctaaatgcaacacttattcgacccactttgaagaggagacactgttctatatcaacacttatcctgattctttggacacaacggactctatattttaatcttacctgacataggaataatccctta

SEQ ID NO: 14058 - DNA, 467 bp, Bos taurus
  Clone ID: 60-LIB3058-017-Q1-K1-G8
atcgacgccccaggccaccgcgacttcattaagaacatgatcacaggcacatcccaggcggactgcgccgtgctgattgtggccgcaggagtgggtgagttcgaggcaggcatctccaagaatgggcagacccgggagcacgcgctgctggcctacacgctgggcgtgaagcagctcatcgtgggggtgaacaagatggactccacggagcccgcctacagcgagaagcgctatgatgaaattgtcaaggaggtcagcgcctacatcaagaagatcggctacaaccccgccactgtacccttcgtgcccatctcaggctggcacggcgacaacatgctggagccctcacccaacatgccctggttcaagggctggaaagtggagaggaaggaagggaacgccagtggcgtgtccctcctggaggccctggacaccatcctgccccccacacgccccacagacaagcc

SEQ ID NO: 14059 - DNA, 403 bp, Bos taurus
  Clone ID: 60-LIB3058-018-Q1-K1-G8
ggcagaggctgacaagaatgacaagtctgtgaaggatctggtcatcctgctgtacgaaacagctctcctgtcttctggcttcagtctggaggatccccagacacatgccaacaggatctacaggatgatcaaacttggtctcggtattgacgaggatgaccccactgctgatgacagcagcgccgcggtcactgaggaaatgccacccctggaaggagacgacgacacgtcccgcatggaggaagtggactgagcgctgccgagggtcgctctgctgtgttcagcgctctgtctccattccctccagtgtgttttcaagtatttctttatttttgttaacatttaaaaatctgtatggcatgataactgcataaggggaggataagatttctttatactaagt

SEQ ID NO: 14060 - DNA, 401 bp, Bos taurus
  Clone ID: 60-LIB3058-020-Q1-K1-G12
ctagatcgcgagcggccgcccttttttttttttttttttttttttttttttttttttgggttttttttttttttttttttttttttttttttttttccaggtaaaattccctttattcttaaaattttttgttcaaaactggttaaaacccctgcaccttatcctcaacctttccttctttttttttttaaactttttttttttttttttgcaaccctttgcaccttttgggaactttaaaccccttttaaatttcctttattccttttttatccgggggaactttggaaagcaaaacccctttttaaaaacccaaattaaagggtcccccttaaaacccaaacttactgttttggcccattttaaatcaaccccaaattctcccacaaaaagcccttggg

SEQ ID NO: 14061 - DNA, 322 bp, Bos taurus
  Clone ID: 60-LIB3058-020-Q1-K1-G8
gcagactctaatggataaagtaggctacatgcaagaatagatgaacaatgtcagcaaagaagtagaaatcctaagagtcaaatgctgcagataaaaaaacactaacagaaatgaagaatcttgatgggcttattggagtggacgtggcttagactctctagcaatagaatatcaatagcattctcaaagaaatgataatatatgatatgatttattagctagtgctatgatgataataatacagcaatatgtaaatgtatcaaatcaacacattatataccttacatatacacaatgttaaatatcagttatatctcaattt

SEQ ID NO: 14062 - DNA, 467 bp, Bos taurus
  Clone ID: 60-LIB3058-021-Q1-K1-G8
ctcccttttcatggggtcaaggaacatcccagcccaccttctccccgttggccacccattgataaggaccgcgggttgtgaatgagcgtcttgcctctgcattagctcattggccaaaggaagactcccctttctgtgaattccaaagtccgcgccttaggactccagtgctgtcatcaccaaagcccctgtgcttctcgtggtccgccaagtgatcctgtggctgcagcttccacatttcagcgtgtgctctccaggccacgcagagttaatcgagtttgtcttttgagctgaatctccttcctctcatggatctttgaggaagacatgaggtcccgtacccagtgggccgctcacgccttagagcagcgtagcttctctacttacctggtgcagaaacagtcaagagaaatcttggactgtgggtttctgtgaacaaagatcccgtcagaagccccagggtgcca

SEQ ID NO: 14063 - DNA, 405 bp, Bos taurus
  Clone ID: 60-LIB3058-022-Q1-K1-G8
gaaggacgcggtttctggaggcgaagaacgcggttggccaatcgcaagccagaagatgaaggttctgtgggttgccgtggtggtcgcgcttctggcaggatgccatgcggatatggagggagagctggggcccgaggagcccctgactactcagcatccccgggggaaggacagccagccttgggagcaggcgctgggccgcttctgggattacctgcactgggtgcagaccctgtctgaccaggtgcaggaggagctgctcaacacccaggtcattcaggaactgactgctctgatggacgagaccatgaaggaggtgaaggcctacaaggaggagctggagggacagctaggccccatggcccatgagacacatgcccgcgtgtccaaggagctgcatgcagt

SEQ ID NO: 14064 - DNA, 360 bp, Bos taurus
  Clone ID: 60-LIB3058-024-Q1-K1-G12
aaaatgtcagttacacgtcaccagacttgaggcatttcaggagtggagttgttcatgaaactctgcttagttcttcccaagaggggatgtattcctttctttcttcccttaaggaagggattcttaagggattcttctgggaaggatgtctcccaccactcctcaactgaccatagacttttagaaaataaaaggtaagactatcagttggcaagggtgcttacccatcttactttggaacactaaagagccagccaggaaagaatggagcatggttgatattataaacagaggattttaaaacaccaagattataagtcatctttaaggaaaaggtgttttgttttttttaaaacctga

SEQ ID NO: 14065 - DNA, 394 bp, Bos taurus
  Clone ID: 60-LIB3058-024-Q1-K1-G8
attgcccactgttgtcacaatttagatgagcaagaatggatcagatactgtgtgtgtgtgtgtgtgtgtgtgtgtgtgctaatcttattctatattctatatgaagcttcactactcccaacactcattattataacccgacgaagaaaccaaatagaacgcactaaacaccgtactctatttactattctatacactatctaactccatacccctattagtcacactaatttatatccaaaacacattatgatccctaaattttctaatattacagtactgagtacaacctgttcatatctcttgatctaatgtcttcatatgactagcatgtataatagctttcatagtaaaaataccactatatgtcctacacctttgactacctaaagct

SEQ ID NO: 14066 - DNA, 422 bp, Bos taurus
  Clone ID: 60-LIB3058-027-Q1-K1-G8
cagagttcactgggcttctcactttggagaaaaaaaaatttttttcttgtccagttagttagaaagataccatgcaatatacggaggtctcctaaactctagaaagtccatgggaagtttggcttaaagaccattttaggaaacttacttggtggtccagttttggggactttgcctttcaacgtgggtggtgtgggttcgatccctggtcaaggagctggaatcccacatgccttggggccatagaagcaaaacataaacagaggcaatattgtggcaaattcaatgaagagtttaaaaaaaaaaaaaagaccattttaatttgcaagagggaaaatctgttttgtgagtcagagttgtggtggggaaaaaagcttgtaaatttgatgtgtggcctcttaaagaccacaggcgaccttgtg

SEQ ID NO: 14067 - DNA, 284 bp, Bos taurus
  Clone ID: 60-LIB3058-028-Q1-K1-G8
gttttagaagtgtaaattaaaactaaaaattagcgttccttttcatcttacggacaagcaaagatcaagaagttttaaaatacacactatccgggtataaagaaataggcattcatacattgctgctgggagcataaattgttagtttctatgagaagcaatttggcactgtctttccagaataaaaatgcacataccactcaattcatcaacttaatatctaggaatttatcttatagacacatgcaatcatattaaaaataacatacctatttatttatatt

SEQ ID NO: 14068 - DNA, 429 bp, Bos taurus
  unsure (375): unsure at all n locations; Clone ID: 60-LIB3058-029-Q1-K1-G8
cttgacttcacctttgtgtgccccacggagatcattgctttcagtgatagggcagaagaatttaagaaactcaactgccaagtgattggtgcttctgtggattctcacttctgtcacctggcatggatcaacacacccaagaaacaaggaggactgggacccatgaacattcccttgatatcagaccccaagcgcaccattgctcaggactatggggtcttaaaggccgatgaaggcatctcattcaggggcctttttattattgatgataaaggaatccttcgacagatcaccataaacgaccttcctgttggccgctctgtggatgagacgctgagactagttcaggccttccagtttactgacaaacatggngaagtgtgcccagctggctggaagcctggcagtgataccatcaagcctgatgtc

SEQ ID NO: 14069 - DNA, 200 bp, Bos taurus
  Clone ID: 60-LIB3058-030-Q1-K1-G12
cgcgcacttcgcatctcgaaagctaaatcgtggcacggacagcctggggcaatctgaggacgtcagtctatcgtagaaacctccacctgtttccggccaggctgtgcaagattaggggctgctgcggaggccaatctcagccaaatcgccttttcccggcaggctctgagtaaacggagactgttgtccacaatcataat

SEQ ID NO: 14070 - DNA, 458 bp, Bos taurus
  Clone ID: 60-LIB3058-034-Q1-K1-G8
ccggaccgacccacgccattcattcggatgatctattaatactaacagattgtgtgaagaaaagggaaacctacactgttgggaaggtaaattggtatagccactttggagaactgtatggaggttcctcaaaacctaaaaatagaggtaccgtatcattcagtaatcccaatcctgggcatgtatctagagagaatcataattcaaaaaaatagatgcagcccagtgttcattgcagcattatttacaatagccaggacatagacgcaacctaaatctcaatcgacagaggaatggataaaagaagatgtggtacgtatcgacaatggaatgttagctgtaaaaaaaagaatgaaatgacctgatttgcagcaacaggaatggacctagagattgttacacaaagtgaagtaagacacagacaaatacatggtatcgcatataagtggaatctaaag

SEQ ID NO: 14071 - DNA, 398 bp, Bos taurus
  Clone ID: 60-LIB3058-036-Q1-K1-G8
gagacgggtcacctcagcctctcgccgttcctatgtctcctcctcagagatggtggtggggggccgccgcctgggtcccggcacccgcctgtccctggctcgaatgccgcctccactcccagcccgggtggacttctccctggctggggcactcaactccggcttcaaggagacccgggccagcgagagggcagagatgatggagctcaatgaccgcttcgccagctacattgagaaggtgcgcttcctggagcagcagaacaaggcgctggctgccgagctcaaccagctgcgggccaaggaacccaccaagctggctgacgtctaccaggcggagctgcgcgagctgcgcctgcggctcgatcaactcactgccaacagcgcccgggctcgaggtg

SEQ ID NO: 14072 - DNA, 441 bp, Bos taurus
  Clone ID: 60-LIB3058-037-Q1-K1-G8
ggggacatcacctactgtgatctcaatgctcgctttggcctgcgtgccatcgtggccgatcctgtcaccttcaagagtcgcagcagctacctggcgctcgccacactccaagcttatgcctccatgcacctcttcttccagttcaagaccacagcccccgacgggctcctcctgttcaactcaggcaatggcaacgacttcattgtcatcgagctggtcaaggggtacatccactacgtgtttgacctggggaatggcccgtccttgatgaaggggaactcagacaaaccagtcaatgacaaccagtggcacaacgtggtggtgtccagggacccgggcaacgtgcacacgctcaagattgactcccgcactgtcacgcagcactccaatggcgcccgaaacctcgatctcaaaggggagctgtacattggcggtctgagc

SEQ ID NO: 14073 - DNA, 407 bp, Bos taurus
  Clone ID: 60-LIB3058-039-Q1-K1-G12
gaggatgcggcccttggacttcgtgtatctggcggagccggaggaggtggaggtgctggagcccgaggaggacttcgagcagttcctgctgccggtcatcaacgagatgcgcgaggacatcgcagcactctcccgtgagcacgggcgggcctacctgcggaaccgaagcaagctgtgggagatggacaatatgctcatccagataaagacgcaggtggaggcctcggaggagagcgcgctcaaccatctgcagaatccggacgacggagccgagggccgggggaccaaacggtgcgagaaggcggaggagaaggccaaggagatcgcgaagatggcagagatgctggtggagctggtgcggcggatagagaagagcgagtcgtcctgaaggagggtcggcgatttac

SEQ ID NO: 14074 - DNA, 245 bp, Bos taurus
  unsure (24): unsure at all n locations; Clone ID: 60-LIB3058-039-Q1-K1-G8
cggactcgtgggtcgcgagctttncgtttttttttttttttttagatgcctaatagaagtactattgattgaaacatattaaaatgaaagtacaaaactgccattttaaatatgtataattcagtcaataaatattgttgcttctttacattaaaaaaaaaaaaaaaaaaaaaaaaataaaaaaaaaaaaaaaaaaaaaaaaataaaaaaaaaaaaaaaaaaaaaaaaaaaaaaaaaaaagggaa

SEQ ID NO: 14075 - DNA, 410 bp, Bos taurus
  Clone ID: 60-LIB3058-040-Q1-K1-G8
gcgcggacgcgtggggcggcggggttcacttccacttccccgtggagggttcggggggcggcaccgtggtcatcaggggcccgtcctcggacgtggagaaggcccggaagcagctgctgcacctggcagaggagaagcaaaccaaaagcttcacagttgacatccgcgccaagcccgagtaccacaagttcctcatcggcaaagggggcgggaagatccgcaaggtgcgggacagcaccggggcgcgcattgtcttcccggcggccgaggaccgcgagcaggacctgatcaccatcatcgggaaggaggatgctgtcagggaggcccagcgggagctggaggcgctcatccagaacctggacaacgtggttgaagactgcatgctggtggaccccaagcaccaccggcac

SEQ ID NO: 14076 - DNA, 359 bp, Bos taurus
  unsure (271): unsure at all n locations; Clone ID: 60-LIB3058-042-Q1-K1-G12
atttaagtagcatcccatcccgtttttttttacctctttgctctccacgactacgaccagagtggacagctggatggcctggagctgctgtccatgttgacagccgctctggcccctggagcttctgactctcccaccaccaacccggtgatcctggtagtggacaaggtgctggagactcaggacctgaatggggatgggcttatgacccctgcagagcttgtcaatttccctggagaggctccgaggcacacagagcccagagagcctncggagccacaagatgttgagatgcaacctctgttggctaaaagcccatcgagacaagaagaacatgacactctgagtcctggagaagc

SEQ ID NO: 14077 - DNA, 411 bp, Bos taurus
  Clone ID: 60-LIB3058-042-Q1-K1-G8
acttgatgctgaaagtggcccaccagtctccatacacacagccccattgttctcctagacaaggccatgaactggcaaggcaagagattcgagtaagagttgaaaaggatccagaacttggatttagcatatcaggaggggttgggggaagaggaaacccattcagacctgatgacgatggtatatttgtaacaagggtacagcctgaaggaccagcatcaaaattactgcagccaggtgataaaattattcaagctaacggctacagttttatcaatattgaacatggacaagcagtgtccttgctaaaaactttccagaacacagtagaactcatcatcttaagagaggtttcctcataagagccgtggacttaaaaaacagagagagagcaagatttattggaagata

SEQ ID NO: 14078 - DNA, 367 bp, Bos taurus
  Clone ID: 60-LIB3058-043-Q1-K1-G8
ccgatcaacctaagccaaaatgggggaggagaacacccacatcatcatcgttctcattgcgcacgtagattcagggaagactaccacgactggccatctgatctataaatgtggcgggatcgacatgagaacaatagaaaagttcgagaaggaggctgccgtgatgggaaagggctccttcaaatatgcctgggtctatggacaaacttaaagctgaacgtgagcgtggtatcaccattgatatctccctgtggaaatgtgagaccagcaagaactatgttaccatcattgatgcccaaggacacatagacttcatcaaacacatgattacaggcacatcccaggctgactgtgcatacctgatcgt

SEQ ID NO: 14079 - DNA, 439 bp, Bos taurus
  Clone ID: 60-LIB3058-044-Q1-K1-G12
agaatggtaaaaagaagaaaatgaagcgtatgtgtcctggcccaggagacaaaggaaatgcttccctgaggagcagtggctcacaggaccagaatgggaaatctaaagagcagcagcagcctgtgagaatgagtcaggggttcatcaaccaacatacggtgcaacgccagggaaagcaaatttgtaaatactttcttgaaaggaagtgtattaagggagaccaatgtaaatttgatcatgatgcagagatagagaagaaaaaggaaatgtgtaagttttatgtacaaggatattgtaccagaggggaaaactgcctatatttgcataatgaatatccttgcaagttttaccatacaggagcaaaatgttatcagggagaacattgcaagttttcacatgctccactgactgatgaaacacaagaactgttggctaaaat

SEQ ID NO: 14080 - DNA, 424 bp, Bos taurus
  Clone ID: 60-LIB3058-047-Q1-K1-G8
atcgcgagcggccgcccttttttttttttttttttcttttaaatcttatttatgatatgaaagccatacatgattaatgtagaaaatttggcaactacagaaaaccaaatggaaaattacaactttattccatcatccaaagataaccactattattaacaatttggagtatgtctgcagtctttttaaaactgtcttgtaagtatacacccatatttaaaaaagcaaaattgagatcacataatacatatcattttataacctttttaatattcagagagcatttttctttccagtcaaatcctctcctacatgacttttaatggctgcgcagtgttccaccatctgggtggatccataacaatttactcaagcaaccccctcttgcaaattttcatcacagtagaaaaagaaatgaattccc

SEQ ID NO: 14081 - DNA, 397 bp, Bos taurus
  Clone ID: 60-LIB3058-048-Q1-K1-G12
cggcctgagtgggtgcacttggacagtcggccttttgcctacctgagccgtgactcaggggccgccctgggtctgggcatcgctctgcactctccctgctatgcccaggtacggcgggcacacctgggatatggccagaaactagtctgtcttgtgctggccatggggctgctgggccccctgaactggctgggctacccccctcagatcagccttttctacatcttcaatttcctcaagtacaccctctggccatgcctggtcctggccctcgtaccctggctggtgcacatgttcagtgcccaggaagcaccacccatccgatcttcctgactctggtgcctgctgcacccacctgccctcacaaagcccatgctctgagacctccacccttggg

SEQ ID NO: 14082 - DNA, 382 bp, Bos taurus
  Clone ID: 60-LIB3058-048-Q1-K1-G8
cgccccgcaatcacaggcctctcgccttcgccgctccgcctgcgccttctgacgacaccgcaaccagttcgccatggatgatgatattgctgcgctcgtggtcgacaacggctccggcatgtgcaaggccggcttcgcgggcgacgatgctccccgggccgtcttcccgtccatcgtggggcgcccccggcaccagggcgtaatggtgggcatgggccagaaggactcgtacgtgggggatgaggctcagagcaagagaggcatcctgaccctcaagtaccccattgagcacggcatcgtcaccaactgggacgacatggagaagatctggcaccacaccttctacaacgagcttcgtgtggcccctgaggagcaccccgtg

SEQ ID NO: 14083 - DNA, 430 bp, Bos taurus
  unsure (419): unsure at all n locations; Clone ID: 60-LIB3058-049-Q1-K1-G12
gcagccaacaggaacttgtgctgtttgtttcaccggtggcaacagatcacttgtagctaatcttgctgctgccaactgttacaaaaaagaaaaacatcttgatatggagaaaaactggatgttggtagacaaagcaagagtttattatatagcaggttttttcctcacagtttctccagagtcggttttaaaagtggctcaccatgcttctgaaaacaacagaattttcactttgaatctgtctgcaccatttattagtcagttctacaaggaatcattgatgaaagttatgccttttgttgacatactttttggaaacgagatggaagctgccgcttttgctagagagcaaggctttgagactgaagacattaaagaaatagccagaaagacacaggctctgccaaaagtcaactcanagaggcagcga

SEQ ID NO: 14084 - DNA, 352 bp, Bos taurus
  Clone ID: 60-LIB3058-049-Q1-K1-G8
cggacgcgtgggtgtcaagcagtttatttgacatgctattttttcatatttattagtcttcagtttgagaaatctttttgttccaacaaagacccattctgtcccacgtatttctacgatgtgtgtcctgtaaattcctaggtcattaaccagtgtcacaatattaaaacagctgctttttaggattttgtttcattgtgtatgctaagttgcttcagttgtgtctgactctttgagacctcgtggattgtagccctccaggcttttctacatccttggtattctccaggcagggattactggaatggggtgccatcccttcttccacgggatcttcctgacccaggatcaa

SEQ ID NO: 14085 - DNA, 426 bp, Bos taurus
  Clone ID: 60-LIB3058-050-Q1-K1-G12
cggcggaaagttcttttctaacgtcgcctgtgcttcttgaggagggacggtatcactgaaccgcagctatgactgaggctgacgtcaatccgaaggcctaccctcttgcagatgctcacctcaccaagaaactattggatctcgttcagcagtcatgtaactacaagcagcttcgaaaaggagccaatgaggccaccaaaaccctcaacagaggcatctctgagttcattgtgatggccgcagatgcggagcccttggagatcatcctgcacctcccgctgctgtgtgaggacaagaacgtgccctatgtgttcgtgcgctccaagcaggctctggggcgagcctgcggggtctccaggcctgtcatcgcctgctccgtcaccatcaaagagggctcacaactgaagcagcagatccagtccatcc

SEQ ID NO: 14086 - DNA, 413 bp, Bos taurus
  Clone ID: 60-LIB3058-051-Q1-K1-G8
gagctctccaggcacctggtggtccccaacatgcagacgggacggctggagcccctgctgtcgcagttcacagaggaggaggagcggcagatgacacgcatgctgcagaggatggacgtgctagccaagaaagccaaccaggtgggcgtgcggctgatggtggatgcggagcagacctacttccagccagccatcagccgcctgacgctggagatgcagcgcaagttcaacgtggagaggccgctcatcttcaacacgttccagtgctacctcagggatgcctatgacaacgtcatcctggatgtggagctggctcgccgggagggctggtgtttcggggcaaagctggtgcgcggtgcgtacatgggcccagaacgtgcccgtgcactggatgtgggctacgaggaccccat

SEQ ID NO: 14087 - DNA, 411 bp, Bos taurus
  unsure (385): unsure at all n locations; Clone ID: 60-LIB3058-054-Q1-K1-G12
tgaaagtagaaaactacagcatttttacctgacgactttcactaacatgggaagagttgtgaaaattctagaatgctgtaaatccttgtcatacactatgacatacgacttcatcacactcccaccaggagccactctcctgtacttagaaataatgtcacaagtagttttctcatgtacaatgcaggcaaatacattgctctctgaatacttgaagaaatggtattacatatataagcctattagttctaccttttcacaatcttgtaatattgccgttaaagggaaagaaaacgcaggctatgagtggagggatggcaacaggaattagagtgtatgactgagctgattttgctcttttggaattggatgaagttgacagtangcattcaccggatgattaagcataag

SEQ ID NO: 14088 - DNA, 401 bp, Bos taurus
  Clone ID: 60-LIB3058-058-Q1-K1-G12
gacggcctgccagacccgggccccgtgaagcagtgtttgctggccatcctcatcctggccctgctggccaccatcttcctcgtgtgcaccgtggtgctggccatccgcctctcccgcaagaaccacctgtaccccgtgcgcgattactcccccagcgagatggtctgcatctcatctctgctgcccgagcggggcgaggggcctgcgcccgtgcccaacggggacctgcccaaggccagggaacagggccggaaggcggggccgagggagggccgtgaaggggatgacctcaccctgcacagcttcctcccttagctcccgagctgctgagccaaggcccatgccgaggctctaagccctgggtcaggctgccttggatccccctggagacgggaatcttc

SEQ ID NO: 14089 - DNA, 431 bp, Bos taurus
  unsure (393),(406): unsure at all n locations; Clone ID: 60-LIB3058-058-Q1-K1-G8
attcgtcacatgatctattatagaattctcaatatgatatatatactcagaccccaatattaacaaattcttcaaatatctactcctattcctcattactatgctcatccttgtaaccgcaaacaacctcttccagctattcattggctgagaaggcgtcggaatcatatcatttctactcatcggatgatgatacggacgagcagatgcaaacacagcagccctacaagcaatcttatataaccgcatcggcgacattggtttcattttagcaatagcatggttcctaacaaatctcaatacctgagacctccaacagatcttcatactaaacccaagcgactcaaacatacccttgattggactagcattagctgcaaccggaaaatccgnccaatttggcctncacccgtgacttccctctgcaatag

SEQ ID NO: 14090 - DNA, 387 bp, Bos taurus
  Clone ID: 60-LIB34-001-Q1-E1-G8
acaatatttaaaaacatgactgagcaaagaaagtttattttggaggaaataaagaaacaccaagaatccctggacctcaataaccctcaagattttattgattactttctgattaaaatggaaaaggaaaaacacaataaacattctgaatttaccatggacaacttgatcaccaccgtatgggacgtgtttagtgctggaacagagacaacaagcctcactctgagatatggactcctgctcctgctgaagcacccagaggtcacagctaaagttcaggaagaaattgatcgtgtggttggcagaaaccgaagcccctgcatgcaggacaagagctgcatgccctacacagatgctgtgctgcatgagattcagagatacattgac

SEQ ID NO: 14091 - DNA, 415 bp, Bos taurus
  Clone ID: 60-LIB34-002-Q1-E1-G8
aacagccgagacgtgtttgtggccattgttcaaagtgtcaagaacaagcctctcttctttgctgacaaactttacaaatccatgaagggtgccggcacggatgagaagaccctcaccaggatcatggtctcacgaagtgagatcgacctgctcaacatccggcgggagttcatcgagaaatatgacaagtctctccaccaagccattgagggtgacacctccgggcacttcctgaaggccttgctggccatctgtggaggcgaggactgaggccactggtgctcacgggcacctctgctgagagatggtcagcggcaccacctgccacgacccagcctgatgctccagcttcagagactaaagaatggacatggttgggggaggggtcagggtgggcgcttgtcttcagctgggg

SEQ ID NO: 14092 - DNA, 418 bp, Bos taurus
  unsure (392): unsure at all n locations; Clone ID: 60-LIB34-003-Q1-E1-G8
gcagcagacaacagcatcgctgaatttccctcccttgtgtgaggagggatccgagctctcccagaaaagccagagaagagcctaccactttgaagaggctcttttattccaagagtcacctggctgaaaaatactgcccaaacacaatacttccagaatgagatttctcagtgtgggtcccaagtcctgcacggccccaccatccacacaggctcgccaggaaatcaaggcgaaccttcattttttcagtgatcacctcgagaaccgctttggagttcttggagtgatccctgaccaggtggaggaatagacacatggctaatcctggaacgctagagcaaaagcattgaccacagggaaagatggaagggatgaaaacctgcctttcctcnccgagggaaaagtagaagcatcaccc

SEQ ID NO: 14093 - DNA, 389 bp, Bos taurus
  Clone ID: 60-LIB34-004-Q1-E1-G12
ccaggaggagcgcgcgggcagcggtgaccgaggcgtgctgggattccagaagtggagaaggaggcaagatgaagactctactgctgttgatggggctgctgctcagctgggagagtggctgggcaatctcggacaaagagctccaggaaatgtccaccgaggggagtaagtacgtgaataaagaaattaaaaatgccctcaaggaggtgaaacagataaagacccaaatagaacaaaccaatgaagagcgcaaattactgctcagctccctagaggaagccaagaagaagaaagaggacgccctgaatgacaccagggattctgaaaacaagctgaaggcgtcccagggggtgtgcaatgagaccatgacagccctttgggaggaatgt

SEQ ID NO: 14094 - DNA, 366 bp, Bos taurus
  Clone ID: 60-LIB34-005-Q1-E1-G12
gaacagctctaagccttctaattcgcgctgaattaggccaacccggaactctgctcggagacgaccaaatctacaacgtagttgtaaccgcacacgcatttgtgataatcttcctcatagtaataccaatcataaatggaggaatcggtaactgacttgttcccctaataaatggggctcccgatataacatttccccgaataaataataaaagcttctgactcctccctccctcaatcctactactcctcgcatcctctatagttgaaactggggcacggacaagctgaaccgtgtaccctcccttagcaaggaacctagcccatgcaggagcttcagtagatctaaccaatttctcgttacact

SEQ ID NO: 14095 - DNA, 414 bp, Bos taurus
  Clone ID: 60-LIB34-005-Q1-E1-G8
gaccagaggtcagaagcatggaagaccagcgtgacctcatctccaaccatgagcagctgcccatgctgggccagcgccccggagcccaggagagcaagtgcagtcgtggagccctgtacacgggcttttccgtcttggtggctctgctcctggctggccaggccaccactgcctacttcctgtaccagcagcagggccggctggacaagctgacggtcacctcccagaacctgcagctggagaacctgcgcatgaagcttcccaagcctgccaagcctatgagccagatgcggatggccactcccatgctgatgcgggcgctgcccatggcaggcccagagcccatgaagaacgccaccaagtacggcaacatgacacaggaccacgtgatgcacctgctcctgaaggcagacc

SEQ ID NO: 14096 - DNA, 408 bp, Bos taurus
  unsure (310),(401): unsure at all n locations; Clone ID: 60-LIB34-006-Q1-E1-G8
ctaaaccagaactgtgtgattttgttgttttataattggaaagactgaactatggatttgggagaccactgacttagggaagttgatgtggaatacagatagttgctggaaataacactgacaacttcaatgcaaaatgaagttctttctgttgctttcagtcattgtgttctgctgggctcagtatgccccacacaccaaaactggacggacatctattgtccatctgtttgagtggcgctgggtcgatattgctcttgaatgtgagcgatacttagcccccaaaggatttggaggggttcagatctcnccacccagtgaaaatgctgtgattactgacccttcaagaccttggtgggaaagataccaaccagttagctacaagttatgtacaagatcangaaatga

SEQ ID NO: 14097 - DNA, 301 bp, Bos taurus
  Clone ID: 60-LIB34-007-Q1-E1-G12
ccgggtcgacgcacgagtccaaaatgagtgatgataccctagtctatatcaacacttagtctgactctttggacaccccgaagtctagatgttaatcttacctgggtttgggataatctctcatggcgtgaggctaggactcaggagttaaagaagtattcggatatatgggaatagtttgggctataatgtcaatcgggtttctaggtttcatcgtatgatcccaccatagattcagtgtcgggatacacgtcgacacacaaggctattgtcacatcaggtcagtattattattgctatt

SEQ ID NO: 14098 - DNA, 292 bp, Bos taurus
  Clone ID: 60-LIB34-007-Q1-E1-G8
aggcaatctgagatggacatctggcacgcttcgagaatgccttcagtcagtataagaaagcggtgctcttccctgatggccaggctgtcggggagaggatcttcagcacagcaggtgctgtagagtcatattcagatgcagagcagctctgcagagaggctaagggacagctggcctccgcacgctcttcagccgagaacgaggccgtgacacacatggtcagagcccacgacaagaatgcttacctgagcatgactgacatctccacggacgggaggttcacttaccccac

SEQ ID NO: 14099 - DNA, 340 bp, Bos taurus
  Clone ID: 60-LIB34-008-Q1-E1-G8
gtgcgctctcacaatgctcaggcggcggcagccgagttccggatactgtcggagtgaggaccaggcgggcgcggggcgatgctgcgggtgcagtgtctgctcggcgggagccgcggtgcctaagcgctgcactacttcaggtctcggtttggaaaaactgtaacgggatgggtgcagcgaactttccagagcacccaggcagctatggcttcgtcccggaattcctgtgcagctcatgacaatgtcactgatccgctgaccagtgacagtcctgtctcctctttcaacgtatgggataccttacacgaagtgatactgggcagtgcagaatctgttcgcg

SEQ ID NO: 14100 - DNA, 333 bp, Bos taurus
  Clone ID: 60-LIB34-010-Q1-E1-G12
aggcacacggcacccaaaaaggccatactaaagctcgtcctgccagaggtatccacacttctcctttgggggagccttccctgaccccctagactaagttcattactcctgcaacgtgtctcccatagcaccttttacttcttccttagtcctctatcctgcttaattgaaattacatggttttgtttgtgtgtatgtgtgtgtatatatgtgtgtgcgcacgcgtgctagactgtaagttccatgggggcagggactttgtctatcatgttcatttctgtattcccatacgcctagcaatgtggagtcaacatttaataaatacatgttata

SEQ ID NO: 14101 - DNA, 413 bp, Bos taurus
  Clone ID: 60-LIB34-010-Q1-E2-G8
ggaaaaactatgagctgctctgcggggacaacacccggaagtctgtagatgattaccaagaatgctacttggcaatggttccttcccatgcggttgtggctcgaactgtgggcggcaaggaggatgtgatctgggaacttctcaatcacgcccaggaacattttggcaaagataaaccagacaatttccagcttttccaatcccctcatgggaaggacctgctgtttaaggactctgctgatgggtttttaaagattccttctaagatggattttgagctgtacttgggatatgaatatgtcactgctcttcagaatctaagagaaagtaaacccccggactcctcagaggatgagtgcatggtgaaatggtgtgcaattggtcaccaggagaagacaaagtgtgatcggtgg

SEQ ID NO: 14102 - DNA, 410 bp, Bos taurus
  Clone ID: 60-LIB34-011-Q1-E1-G8
aaaagatgccttcctgggctcgtttttgtatgaatattcaagaaggcatcctgaatatgctgtctcagtgctattgagacttgccaaggaatatgaagccacactggaggaatgctgtgccaaagatgatccacatgcatgctattccacagtgtttgacaaacttaagcatcttgtggatgagcctcagaatttaatcaaacaaaactgtgaccaattcgaaaaacttggagagtatggattccaaaatgcgctcatagttcgttacaccaggaaagtaccccaagtgtcaactccaactctcgtggaggtttcaagaagcctatgaaaagtgggtactacgtgttgtacatagccggaatcagaaagaatgccctgtactgaagactatctgagcttgatcctgaacc

SEQ ID NO: 14103 - DNA, 388 bp, Bos taurus
  unsure (368): unsure at all n locations; Clone ID: 60-LIB34-012-Q1-E1-G12
ggccaccctgctgttcatctccatctggaagcacatctacagcagctggaaactgccccctggccctttcccactgcccatcatcgggaatcttttacagctggatattaagaacattcccaaatccttcaccaggctggcggagaggtacgggccggtgttcaccctgtacctgggctctcagcgtgccgtggtcgtgcatggctacaagcccgtgaaggaggtcctgcttgactacaagaacgagttttctggcagaggagaaaaccctgggttccagatgcacaagaacaatgggatcattttcaacaatggatcaacctggcgggacacccgacggttctcgttgaccaccctccgtgacttanggatgggaaaacagggcaat

SEQ ID NO: 14104 - DNA, 320 bp, Bos taurus
  Clone ID: 60-LIB34-013-Q1-E1-G8
aaactttggtgcagtcacgtgggtgatccttcacctctctgcaccgtcactgcatgtctgcataatccaatggtatgtatcgtcgatacacggatactgttacgattgcacacccgtgtgaaaatgtgtgaaaatggcatttgtaacgcatgttgctgactgacttatcgcaggatcaccaacactatcgagttgctaatgatgcataattaatgtacgtgccaactgagtttgcaaaaacatgtgttgctgatgactcacaagcaggctgtgaaaattcacttcacacactccttggacatgaagtgtgtagagttgca

SEQ ID NO: 14105 - DNA, 331 bp, Bos taurus
  unsure (268): unsure at all n locations; Clone ID: 60-LIB34-014-Q1-E1-G12
agccatgaacagcgtaggggaggcttgcaccgacatgaagcgcgagtacgaccagtgcttcaatcgctggtttgccgagaagttcctcaagggggacggctccggggacccatgcaccgacctcttcaagcgctaccagcagtgtgttcagaaagcgataaaggagaatgagattcctattgaaggactggagttcatgggccatggcaaagaaaagcctgaaagctcttcttgaccttgacagtcatcttgaaagtggactcctcanatcaggaaattgaggactctggatcgtatcaattacaactgacgatagcatgatttgatgaaa

SEQ ID NO: 14106 - DNA, 409 bp, Bos taurus
  unsure (374): unsure at all n locations; Clone ID: 60-LIB34-014-Q1-E1-G8
ggtcgacccacgaatccgactaggcactccaaagaaagaggtccaggtaaaggacactttcgcttccactggagaccaactggatatattcaccgacttccttcactaaagaaaggtgaagttctccctcttccagaagccaattttcccagcttctcattgccaaaccacaataatcccctacagccagagattcaggccttcccccagtcagcctctgaatcatgtcccgggacattcaacattaagtttctacatatatcaaagttttttgcatatacattaccaaaataaagtctgatttccttgatggggaaaaatgagtcatgttctgaatgagaaccataaataaaatgtgaccagtactataaaanagccacaccaattacaataaaaagggcggacgctc

SEQ ID NO: 14107 - DNA, 396 bp, Bos taurus
  Clone ID: 60-LIB34-015-Q1-E1-G8
cctccgggcaagtgcgcagtctctactcccgctcccccagggtccgcggccaccatggcgcattagaggcagcagtgcctgcggcagcatcggcctttgcagcggcggcagcagcaccaggctctgcagcggcaaccccccccagcggcttaagccatggcgcttttcacggcattcagcagcagccttgctgtaaccgacaaagacatcttcgaattaagcacattcctcgagttaagcaccaaaacctcgcaacatggccgagatgagctttctgagcagcgaggtgttagggggggacttcgtgtcccccttcgaccagttgggtttgggggctgaagagagcctaggtctcctagatgacaacctggaggtggccaagcacttcaaacatca

SEQ ID NO: 14108 - DNA, 416 bp, Bos taurus
  Clone ID: 60-LIB34-016-Q1-E1-G8
gttctgaaaccctagaggacgcaactgtgagtgtctctgtcctagcctctcaacttgctttcctgtgtccaatagcactgcagactccagtactagcctgtccagagcagcaagtgagaggaaacaagccagcattgtaagaggacatgcttctcctccctctctccgtgctgctcctgctcacacagccctggagatccctgggagcagaaatgacaaccttttctcagaaaatactggccaatgcctgtaccctggttatgtgtagccccctggagagtggcttgcctggtcatgatggacaagatgggagagaatgtccccatggagagaagggggatccaggttcaccaggacctgcaggacgagcaggaaggcctggatgggttggccctattgggccgaaaggagacaat

SEQ ID NO: 14109 - DNA, 390 bp, Bos taurus
  Clone ID: 60-LIB34-017-Q1-E1-G12
cggacgcgtgggagcggaggtcgcaggcacggtccccggccgcgaccatggcggagaggcccgaggacttaaacctgcccaatgccgtcatcaccagaatcatcaaggaggcgctcccggacggtgtcaacatctccaaggaggcccggagcgccatctcccgcgccgccagcgtcttcgtgctgtacgccacatcctgtgccaacaactttgcgatgaaagggaaacgcaagacactgaatgccagcgatgtgctgtcagccatggaggagatggagtttcagcggttcgtaaccccgttaaaagaagctctggaagcttataggagggagcaaaaaggcaagaaggaagcttcagagcaaaagaagaaggacaaagacaaaagaacag

SEQ ID NO: 14110 - DNA, 405 bp, Bos taurus
  Clone ID: 60-LIB34-017-Q1-E1-G8
ggggtacagtaatgcacaatagaatctttgttctctcaacaacctaaagtaggaggtttatttccatagtctgatagtgccaggtaaatgtcaattaaacagaaatatagtatttcaattgatttttgtttcattttccattgcattgtaaattcatgtgtactaagcaaagtgatcatttttttacatttctgctttgaatgcagatgcaatttaatataatagattttttaaaggaattaaagataatacataaatctttagcttttatacaaatatatttaattcagaagtgtgtttatacacatatacacacatgtgttcatatatgtaccacatatatacatgacaaatggttaaataaggtgcagaaatatttatctttgcaagttatgcaggttcatc

SEQ ID NO: 14111 - DNA, 389 bp, Bos taurus
  Clone ID: 60-LIB34-018-Q1-E1-G8
aggacagacagtcgctgtgggtgtcatcaaagcagtggacaagaaggcagctggagctggcaaggtcaccaagtctgcccagaaagctcagaaggctaaatgaatattagcgccaatacctgccaccccagtcttaatcagtggtggaagaacggtctcagaactgtttgtctcaattggccatttaagtttaatagtaaaagactggttaatgataacaatgcatcgtaaaaccttcagaaggaaaggagaatgtttttgtggaccatatgttttgtgtgtggcagtttaagttattagtttttaaaatcagtactttttaatgaaaacaacttgaccaaaaatctgtcacagaatttgagacccattaaaaaaagtttaatgagaaa

SEQ ID NO: 14112 - DNA, 389 bp, Bos taurus
  Clone ID: 60-LIB34-019-Q1-E1-G12
agctggagagtggcttgcctggtcatgatggacaagatgggagagaatgtccccatggagagaagggggatccaggttcaccaggacctgcagggcgagcaggaaggcctggatgggttggccctattgggccgaaaggagacaatggctttgttggagaacctggaccaaagggagacactgggccacgtgggcctccaggtatgcctggaccagctggaagagaaggcccctcagggaagcaggggagcatgggacctccaggcacaccaggccccaaaggagagactgggcccaaaagaggagtgggtgccccaggcatacagggcttcccaggcccctcgggtctcaaaggagagaaaggtgcccccggggagactggagcccct

SEQ ID NO: 14113 - DNA, 411 bp, Bos taurus
  Clone ID: 60-LIB34-020-Q1-E2-G8
gccccgggcacgccgagaccatgagttggtcctcgcaccctccgagtgtaatcttctacattcgttcattgctttcttcagcatgcctggcatatgttgctacccgagacaactgctgcatcgtagatgtcagatttggtagttattgcccaaatacctgtggaattgcagatttcctgaataattaccaaatcagtgtacacactgatctaagagctttggaatgcatcgtatatcatgttgagaacataacaacacaatccagaaagctggtcaaagcaatccagatcagctataaccctgatgaaccatcaaagccaaataacatatagagtgctaccacgaattccaagagtatgatggaagaaattatgaaatattagacactgatatcagcacatgtatcatcaa

SEQ ID NO: 14114 - DNA, 431 bp, Bos taurus
  unsure (237): unsure at all n locations; Clone ID: 60-LIB34-021-Q1-E1-G8
gactgtgaagaataatatcccaactaagcttcgtgtgctccgttcaattctggagaatttgagaagcacaatacaagaattagaatcggatgtctcaactcagatggaatactgccgcaccccgtgtactgttacttgcaatattcctgtggtgtctggcaaagaatgtgaggaaatcatcacgaatggaggtgaaacatctgaaatgtacctcattcagcctgaggattctagcanaccatatagagtatactgtgatatgaaaacggaaaaaggaggatggacagtaattcagaaccgtcaagatggtactgttgactttggcaggaaatgggatccatataaacaaggatttggaaatattgcaaccaatgcagaacggaagaaatactgtggtgtaccaggtgagttatggctcggaaatgacagaa

SEQ ID NO: 14115 - DNA, 444 bp, Bos taurus
  Clone ID: 60-LIB34-022-Q1-E1-G12
tctggctttaggctctttagaaaagcttattacttcttaatattttatttgaaccacagcccttctgatgttttttctataataggaagcttcatttttgaatcgtgcttctcgaaagttgaggcaattccttaaaatgaatatcagtgacgatttcaagcttcacctatcaacagtttcacagggcacattaacactgctgaactgcaccagcaagggtaaaggaagaaaaccaccttccctgagtgaagctcaacccactaagaatttggaagagaataaatcttcaaaggaacagaaaaaacagaatgacctgtgtttcctaaagatactactacaaaagataaaaacttgttggaataaaattttgaggggcattaaagaacactgaaaatatggagtagcaatataaaaccttgagctttatttgtgtcctccaagaat

SEQ ID NO: 14116 - DNA, 426 bp, Bos taurus
  Clone ID: 60-LIB34-022-Q1-E1-G8
ggcattgttgggttcctgtgtcgtcttggaggtgactcggcgtgattgaatttgcggcatcttcgcattcactcacaggtcaaaatgcagatcttcgtgaaaaccctgaccggcaagaccatcaccctggaggtggagcccagtgacaccatcgagaacgtgaaggccaagatccaggataaggaaggcattccccctgaccagcagaggctcatctttgccggcaagcagctggaagatggccgcactctttctgattacaacatccagaaagagtcgaccctgcacctggtcctccgtctgaggggtggtatgcagattttcgtgaagaccctgaccggcaagaccatcaccctggaagtggagcccagtgacaccatcgagaacgtgaaggccaagattcaggataaggagggcattcccccc

SEQ ID NO: 14117 - DNA, 379 bp, Bos taurus
  Clone ID: 60-LIB34-023-Q1-E1-G8
agatcccacccactaataaaaattgtaaacaatgcattcatcgaccttccagccccatcaaacatttcatcatgatgaaatttcggttccctcctgggaatctgcctaatccgagaaatcctcacaggcctattcctagcaatacactacacatccgacacaacaacagcattctcctctgttacccatatctgccgagacgtgaactacggctgaatcatccgatacatacacgcaaacggagcttcaatgttttttatctgcttatatatgcacgtatgacgacgcttatattacgggtcttacacttttctagaaacatgaaatattggagtaatccttctgctcacagtagtagccacagcatttataagatacg

SEQ ID NO: 14118 - DNA, 373 bp, Bos taurus
  Clone ID: 60-LIB34-025-Q1-E1-G8
caagaatactggagtgggttgccatttccttctccagtgcaagaaagtgaaaagtgaaagggaagtcgctcagtcgtgtccgactcttagcgaggcgatggactgcagcccaccaggctcctccatccatgggattttccaagcacgagtactggagtggggtgccattgccttctccgtgttacatattaaaactgacaaataatcctagtacagattggcagaaaaagtactagcacagggtgattttaaaaagtcaaatacggctggttaatgtatttcttcaggctgctctcgcctacagtctgccgacagatgagtgctgtgggtacattggggaataaacacagggctgatgcagctttttcgttta

SEQ ID NO: 14119 - DNA, 412 bp, Bos taurus
  Clone ID: 60-LIB34-026-Q1-E1-G8
ggcaagcggaagtgcatcggtgagaccattgcccgcttggaggtctttctcttcttggccatcctgctgcatcaggtggaattctgtgtgaccccgggtgtgaaggtggacatgacccccgtgtacgggctgaccatgaagtacgcccgctgtgagcactttcaggcgcacatgcgctcttaggggacaggcagccctgtagcctagacagcccatgcgctcttgggggacagacagccctgtccctgtctgggcagccaggccaggggcctagcccaggggagcctaaaacccacagacattgtcgggctgacttttttgctgtctgagctgtgggcaagcctgagggatcatacctgccccctaccctggacttgtcgttcttcacagtgaccacagatagtggacacat

SEQ ID NO: 14120 - DNA, 363 bp, Bos taurus
  Clone ID: 60-LIB34-027-Q1-E1-G8
caagcctccgcttagcaatttctgcagaaagcatccctaaaggcactcagcaagacaccaccaaactgaccgcatcaaagagaaatttcatcatctacagagggctccgcttcaggtgttcctgcaaagcttggtgtgaagacagctttccaggcttacgtgtcttgcatgatgttcctgctgcaaggtgcccagatgctgcagatgctggagaaatccttgaggaagagccttcctatgtccttaaaggtttatgggatcgtcatgcacatgagccatggaaacccattcaatctaaaggccctggtggacaagtggcctgattttcagacggtgggtatccgccctcatgagcaggacatg

SEQ ID NO: 14121 - DNA, 296 bp, Bos taurus
  Clone ID: 60-LIB34-028-Q1-E1-G12
acatcatcgcattctgacttccccaactaaatgtgtactctgagaaaacaagcccatacgaatgtggatttgaccccataggatcagcccgccttcccttctctatgaagtgtctttctggtagccatcacattcctcttatttgacctagaaattgcactcctcctaccactgccatgagcctcacaaacagcaaatctaaacacaatgcttaccatagccctcttcctaattatcctcctagctgtaagcctagcctatgagtgaactcaaaaaggactataatgaaccgaata

SEQ ID NO: 14122 - DNA, 377 bp, Bos taurus
  Clone ID: 60-LIB34-028-Q1-E1-G8
aaaaaatgtcagggatcaactggtagatatgaaacgattggaggtggacattgatattaagatccgatcttgcaaagggtcatgcagtagagctttagaacataaggtaggtctggaggactataaaaatcagcagaagcaacttgaacaggttattgccataaacctacttccctctagagacattcaatacttaccattgataaaaatgagtacaattacaggccctgttcccagagagttcaagagccagctccaagaggcccctctagaatggaaggcactgctggaaatgcagcagacgaaaatggtgttggaaactttcggtggcgatggacatgccagaggagactctgtatctcaaggaacaggattag

SEQ ID NO: 14123 - DNA, 380 bp, Bos taurus
  Clone ID: 60-LIB34-029-Q1-E1-G8
gaggaaagccgctctggcagcgccggcgtgacccacccgccatgctccccccagcgctcgtcttgctgttggggtttctctgccacgttgctatcgcaggacgaacctgccccaagccagatgagctaccgttttccacggtggttccactgaaacggacctatgagcccggggagcagatagtcttctcctgccagccgggctacgtgtcccggggagggatccggcggtttacatgcccgctcacaggactctggcccatcaacacgctgaaatgcatgcccagagtatgtccttttgctgggatcttagaaaacggaacggtacgctatacaacgtttgagtatcccaacaccatcggcttttcttgccacacgggg

SEQ ID NO: 14124 - DNA, 414 bp, Bos taurus
  Clone ID: 60-LIB34-030-Q1-E1-G8
ggccaatggagctgggcacacaggtctgtaggcagagcatctgcacagagtaaaaggggaacaactgttagagcaactttgtgtgagtccttccaagacccatcccagtgtctgggagaaatctcaccattacctgtgtcccctcatccccttcctgtttcctcgtagtgcctcagacagccccactgttcttctgaacactttctggtccaggaaaccaggccatgtggctgtacctggtggtcctcgtgggcctgtactacctcctacgctggtaccgggagaggcaggtggtgagccacctccgggacaagttcgtcttcatcacaggctgtgactcgggcttcgggaacctgctggccaggcagctggacctgagaggcttgagggtcctggctgcatgtctgacagaga

SEQ ID NO: 14125 - DNA, 416 bp, Bos taurus
  Clone ID: 60-LIB34-031-Q1-E1-G8
tactcctcgcatcctctatagttgaagctggggcaggaacaggctgaaccgtgtaccctcccttagcaggcaacctagcccatgcaggagcttcagtagatctaaccattttctctttacacttagcaggagtttcctcaattttaggagccatcaacttcattataacaattatcaacataaagccccccgcaatgtcacaataccaaacccctctgttcgtatgatccgtaataattaccgccgtactactactactctcgctccctgtattagcagccggcatcacaatgctattaacagaccggaacctaaatacaaccttcttcgacccggcaggaggaggagaccctattctatatcaacacttattctgattctttggacaccccgaagtctatattttaatcttacct

SEQ ID NO: 14126 - DNA, 445 bp, Bos taurus
  Clone ID: 60-LIB34-034-Q1-E1-G12
tagcaatgcaatccagataaggcttttaatctaaaatgctggagagttttcttcgccaaaacagaattacaaagaacaggagatagcttcctttgttttaaataggaggcataattattcttttagaaagcagttcccactgtttctgttaacctattctaggaacagtataaaaatctgtgtactccacagcgaacttacacatgataaagacagaattcctgaaccctgcaatagtctgtttctatcaggatagtacttgggatgctgctttattggctttgaaaacactgtaaaataagctcagtactgttaccatgagatacagtgatatattcctggataagaataacttgcgtgtttgttatggaaatttagttcatatagtgtttacagaagtacttttgtaacttccagactttctaaaacattctgcttaaaaact

SEQ ID NO: 14127 - DNA, 387 bp, Bos taurus
  Clone ID: 60-LIB34-034-Q1-E1-G8
gcggcggctctggatccactgcccacatcccgctctcgcaggcagacatgagggcagagagaacttcgttcctcctggccctggggctcctgctggctgggatccgcagtgtccaatgcctcccagaaaatgtggtggtgaaggaccagcacagaacggtggatggacacacgttagcctccagcaacaccgacatcgccttcagcctctacaaacagttggctttgaagaaccccaataagaatgtcatcttatccccgctgagtgtctccatagccttggccttcctgtctctgggggcccgtggctccaccctgacagagatcctggaacgtctcaagttcaacctcacagagattcaggacaacgatattcaccatagctttc

SEQ ID NO: 14128 - DNA, 350 bp, Bos taurus
  Clone ID: 60-LIB34-035-Q1-E1-G8
aagagctccagactgtggccagcatacctggtggaatcaggattgggtcttattacaatggtatggcttgagcggctcaatgcatttccccagctgatatatggaaccctgtgtatatgacttcacacctgatgtgtaaagagaaggctatatacagcctgaatcctaaggggataaccacatataatgtggctgaccattttgggacatcgcgggagaagcatgatatctttgcactggcttcacagcaaaatgtagccattgcccaaagacatggctgtttccatgcctcaattgtcccagtcatcatcacagtccgtcacgatcacggcacacagcacagcatcact

SEQ ID NO: 14129 - DNA, 307 bp, Bos taurus
  Clone ID: 60-LIB34-037-Q1-E1-G8
ggcggctgaggctcccggaaccgggcctggcgatcggaggctgcggagcctggacgagctttcagggccagggcagctacgcctcttattccagctgttggtgcaaggctacgttctgcatttgcaccagctccaggtgctgcccttctggaagcggtacctggatggctggaacaccatattctcttttggaaaaaagctgattgatcagaaattggaggagatagaggcccagctgaagacagagaatccagagaagacccagatatctggttatctgcatttcctgctgaacagcggacaactc

SEQ ID NO: 14130 - DNA, 226 bp, Bos taurus
  Clone ID: 60-LIB34-038-Q1-E1-G12
tgtgctttctgtatttaaaactttgactgtactaataagcaaatgcaaggttataaatttagctaatagtagtttacagacaattcgaatgattatgattttatttggtttaagctgtactagtatatttcgtaaggaaatgatgctgtagacaaatgtaaataaagcttgtgagtcaagcatcaagtgatgtttgttagaaataaattagaatttttaagctctg

SEQ ID NO: 14131 - DNA, 130 bp, Bos taurus
  Clone ID: 60-LIB34-038-Q1-E1-G8
aaaaaagagaaatgaaaactcagagcttattcatctgttttccttttctgttggtgttaaaccaacactctcactaaagaacgtaaatttctttaaatattttgcttcttttgtttgtgctacaattaat

SEQ ID NO: 14132 - DNA, 390 bp, Bos taurus
  Clone ID: 60-LIB34-041-Q1-E1-G8
gaatttttggtgaggccaacttcagggtgttcttgtaaactcttatctgaggaggaactaatgctatttcagatcaaagcagtcttcctccctaagaaactacccaaggaacaatgatagagtcttcttcctcgggtgtctgcagagatttttttcaaaagcctttggtaaactccaattcatagggttaaccacaggaattttatagttagcaccaggattaaaggaggcacgcttgaaaggctcaaaattgacgtgacatgtgcagaaaagtgtcaatgaagcatcagcgagttccagttatgatccttcatagcaaggggacaatggcatcctggcccttcatcaggctgtggagtatctctgatccaattcggtggcaaagtgacc

SEQ ID NO: 14133 - DNA, 225 bp, Bos taurus
  Clone ID: 60-LIB34-042-Q1-E1-G12
aaatctatcaatagaaagcctaacccgatgaaaactatttattactatgctgatctcatctataactattcctaagttatagcctttaccgccatggaacgaagcttattgtagtttctacttgaaacagtaatagttctatcactcaatactgatacgcgatgacgaaaccaacgagatcgcattcacatcggactcgatttcctatgctgtacactagctgga

SEQ ID NO: 14134 - DNA, 290 bp, Bos taurus
  Clone ID: 60-LIB34-043-Q1-E1-G8
atccgcacgtacacagtattaaggaaatcactgtggccaagaacaaacaatttggacagtactcctacatgaaagatttcacacgctggtaaggaggatgaaatgtgagctgtcataaatggcataacatcgagacaaatgcgaagtgctataagaaattgactatcacgctttttggagatggcagcttaatgagaaacagattttatataatgacctggtaaggcacatgtacaaacattgaacatgtatgtgatacattctgatcagattgaaaagacctatgaggt

SEQ ID NO: 14135 - DNA, 362 bp, Bos taurus
  Clone ID: 60-LIB34-044-Q1-E1-G12
acgaggatgtgccttgtggcaacattgtgggcctggtgggcgtggaccagttcctggtgaagactggcaccatcaccacctttgagcatgcccacaacatgcgggtgatgaagttcagtgtgagccctgttgtcagggttgctgtggaggccaagaacccggccgacctgcccaagctggtggaaggtctgaagcggctggccaagtcggaccccatggtgcagtgcatcatcgaggagtccggggagcacattatcgcgggggctggggagctgcacttggagatctgcctcaaggacctggaggaggatcacgcttgcatccccatcaagaaatctgacccagttgtctcgtaccgggag

SEQ ID NO: 14136 - DNA, 302 bp, Bos taurus
  Clone ID: 60-LIB34-044-Q1-E1-G8
gacgcacgcaaccacgcggtttctggatgcgaagaacgcggttggccaatcgcaagccagaagatgaacgttccgtgggttgccgtggtggtcgcgcttctggcaggatgccacgcggatatggatggagagctggggccctatgagcccgtgagtacccagcagccccggcggaatggacagccatccttgggagcatgcgctgggccgcttctgggattatctgcgctcggtgcagacgctgtctgaccatgtgcacgacgacctgctcaacagccagggtcattcaggaactgaccgcg

SEQ ID NO: 14137 - DNA, 268 bp, Bos taurus
  Clone ID: 60-LIB34-046-Q1-E1-G8
gtcgacccacgcgatccgatttttttttttaggaaacaaaatatttattgaaatggtatgtagataaattatcaccggcataaaactgttagtggagttctcaacatgggttctttttacttttagagtgaagtgaggctttgcaagtccattgtcccataggaaaaatattatctttttcttttcagataaagttctttaagagagtaaatcacttttgaaatggtcttttatacgtctccagcctatgatcaagagaaaagaaaaa

SEQ ID NO: 14138 - DNA, 455 bp, Bos taurus
  Clone ID: 60-LIB34-047-Q1-E1-G8
cccacgcgtccgggcgacctttggagagataaacgtgcgaccgtggagtgcgcctgcgcagctttggaagccgcaggtttttgaaatatgaatccttcattcttcctgactgtcctttgcttgggagtagcatcagctgctcccaaacttgatccaaatttagatgcacattggcaccagtggaaggcaactcacaggaggttatatggcatgaatgaagaagaatggaggagagcagtgtgggagaagaataagaaaataattgacctgcataatcaggaatacagcgaagggaaacatggcttccgcatggcaatgaatgcctttggtgacatgaccaatgaagaatttaggcaggtgatgaatggttttcaaaatcagaagcataagaaggggaaactgtttcatgaacctctccttgttgacgtcccaaatctgtggattggactaagaaa

SEQ ID NO: 14139 - DNA, 414 bp, Bos taurus
  Clone ID: 60-LIB34-048-Q1-E1-G12
atccagctgcctgcctgctgacacaccggggcctctctgaagccaccatgaaatccttcgttctgctcttgtgcctggctcagctctggggctgccactcgatcacgcttgacccggttgcaggttataaggaaccggcctgtgatgacacagacacagagcatgcagccttggctgccgtggactacatcatcacgcaccttcctcggggctacaagcacaccttgaaccagattgacagtgtgaaggtgtggcctatgaggcccacgggagaggtgtatgacattgaaatagatactctgtaaaccacctgccacgtactggaccccacgcccctggctaactgcagcgtgaggcaccagactcagcacgcggtggaatgagactgcgatatccacgtgctgacacaagatg

SEQ ID NO: 14140 - DNA, 237 bp, Bos taurus
  Clone ID: 60-LIB34-048-Q1-E1-G8
attcgcgggtccacgcacgcatccaaactttagtgacataaacttgataactttgcatgtccctgtgcatctttcgaactcgcaggttctggacagataaacccatcagtcctcacgactgacctttacttgggaggaacaggagctgctcacatacttgtgtccagggtttacatgcacattggtatcattggcaggcaaatcacaagtcgttatatgcaatctgtgacgaacatc

SEQ ID NO: 14141 - DNA, 378 bp, Bos taurus
  Clone ID: 60-LIB34-049-Q1-E1-G12
agcacccataggacatgcaatatgacaggttatatcaaatgcctagtctttgtagtggcagatggtggtttagtcacttcgtcatgtgccagtcttgtgaccccatggactgactgtagcccaccagtctcctctgtccaaggcattttccagtgctgtctatgctcccagcactgagagaggccttgcatacatcagctcatctctgagagccttactgctctgctgactaacaatccttcatgcagtctagaactattcgacgatctgccgataataagtttcacagtaagtaacgtaactgtgtccagtccatgcatgcaggtggttcatttgcgattccagttagccatattctctggatataattatttggat

SEQ ID NO: 14142 - DNA, 404 bp, Bos taurus
  unsure (380): unsure at all n locations; Clone ID: 60-LIB34-049-Q1-E1-G8
aaaaatgacaactggaggcaaagttattaatgatggtttatggcatatggtctctgtggaagaattagaacagagtattagtgtaaaaatagctaaagaagctgtaatgaatataaataagcctggaagccttttgaagcccaccaatgggtttctagaaaccaaagtatactttgcaggagtacctcggaaaatggaaaatgcactcattagaccgattaaacctcgtctagatggatgtattcgatgctggaatttgatgaatcaaggaacttcaagagtaaaggaaatcattcaagataaacacaataagcattgtcatgtcaatgtggagaatggttcctactatcctgatactggagttgctcagtttagcatanattataagaatgaatccaatcctg

SEQ ID NO: 14143 - DNA, 427 bp, Bos taurus
  Clone ID: 60-LIB34-050-Q1-E1-G8
gaggaggctgcaggtggtgctgggtcacctgaagggccggcccgcttcggacccggagccgcaggccaccccgtgttggagcggcgcgcggcgggcgtccgcagaggatgtcgtggtggtgcacgggcggcgcacggccattggccggtcgggccgcggcggcttcaaggacaccacccccgacgagcttctctccgccgtcatgaccgcggttctccaggacgtcaagctgagcccggcccagctgggagatatctgcgtgggaaacgtgcttcagcctggggccggagcgaccatggcccgaattgcccagtttctgagtgacatcccggagactgtgcctttgtcagctgtcaataggcagtgttcgtcggggctccaggcggtggccagcatagctggtggcatcagaaatgggtcctatgac

SEQ ID NO: 14144 - DNA, 227 bp, Bos taurus
  Clone ID: 60-LIB34-051-Q1-E1-G8
tgtgcatatatctgcacacttcccgatactgagaaacaaatcaagaaacaaactgcacttgttgagctgttgaaacacaagcccaaggcaacagaggaacaactgaaaaccgtcatggagaattttgtggcttttgtagacaagtgctgtgcagctgatgacaaagaagcctgctttgctgtggagggtccaaaacttgttgtttcaactcaaacagccttagccta

SEQ ID NO: 14145 - DNA, 237 bp, Bos taurus
  Clone ID: 60-LIB34-052-Q1-E1-A7
gacctcaccaacctcatccacaccaagtacccgcagctcctgtcaggcatccgaggcatctctgaagagaccacaacgggggtccacaacctgtacaagatgatggccaaagggatcctgaaggtgccggccatcaatgtcaatgactctgtcaccaagagcaagtttgacaacctctatggctgccgggagtccctcatagatggcatcaagcgggccacagatgtcatgattgcc

SEQ ID NO: 14146 - DNA, 241 bp, Bos taurus
  Clone ID: 60-LIB34-052-Q1-E1-G12
ttctactgtaactttcagatgccagatgattctcatagaaagctttcatggacttttgtcggatttttgtgttcctagccaacctgtgtaactgacaagtcagtgtagttctgacatgaatgctggctgatttttccacttacattcatgaataaggggaatgtgaaataacaaagttgccttttggaactctattaaggataatgaccagcaccttctttgctaatttagataatacctt

SEQ ID NO: 14147 - DNA, 235 bp, Bos taurus
  Clone ID: 60-LIB34-054-Q1-E1-G8
gcctcagaccacactatctccactcgctcagacctgtggaagattagcgaccatgatttccaatgggataggaaccgtcaccgctggaaaaaggagtatatgtcttctccctttgctgcttattggcctctggggctgtgtgacctgtcatcggagccctgtggaagacgtctgcacagccaaacctcgggacattcctgtgaatcccatgtgtatttaccgttcctcagagaag

SEQ ID NO: 14148 - DNA, 346 bp, Bos taurus
  Clone ID: 60-LIB34-055-Q1-E1-G8
gcggctgggagcctgtacacatatcctgaaaactggagggccttcacggccctcagtgccgctcagtacagcggggctcaggtccgcgtgctctccgcacgaccccacttccattttggacacaccaaccgcacccccgaatttctccgtaaagttcctgctggcacagttccagcctttgagggtgccgacggattctgtgtattcgagagcaatgccattgcctactaagtgagcagcgaggagttgcggggaaatactcccgatgcagcagcacaagtggtgcagtgggtgagctttgctgatagcgacatagtgccaccggccagcacctgagtgtccccta

SEQ ID NO: 14149 - DNA, 297 bp, Bos taurus
  Clone ID: 60-LIB34-056-Q1-E1-G12
aagtcccgggtagacccaaacgtccgggagatcataatcgcaatacatttcgatctgaagtcgtctcactatggtggctgtacatgttcagtcctccttaggcctgtacgatctcgtgcgctgggatcgagagaggcaagtggcgcgccacctccatgacagttttgtcttcatcaaggacggtgactcgggatttgtgaaccaccaggacaagcaacttcaccttcaatgtctacaggtcgtgggtggttgtctgacggagtatgggtgtaaccatactcatgactcagtgttcaa

SEQ ID NO: 14150 - DNA, 374 bp, Bos taurus
  Clone ID: 60-LIB34-056-Q1-E1-G8
gaggagcctggaaggcagagcaactggacctcgcctaagctgtgtctctgactcatttctgactttacgcaagttcttccaatgggaaaaatggcgaagatgtttagtttcatccttgtcaccactgctctggtaatgggcaggggaagctcggctctggagaactgcctccaggagcaggcgcggctcagagcccaagtgtacctgctggagacccgggtcaagcagcaacaagtcaagatctcgcagcttttgcatgagaaacaagtccagctccttgataaaggagaggagaatagtgtcattgaccttggaggaaagaggcaatacgcagattgttcagagattttcaatgacgggtacaagcagagtgg

SEQ ID NO: 14151 - DNA, 220 bp, Bos taurus
  Clone ID: 60-LIB34-057-Q1-E1-G8
aattcccagagacagatgatgaagaagaaaataagcttgttaaaaagataaaggaccgtttacctcttgctgtggtaggtagtaatactatcattgaagttaatggaaaaagggtcagaggaaggcagtatccttggggtgttgcagaagttgaaaatggtgaacattgtgattttacaattctaagaaatatgttgataagaacacatatgcaggactt

SEQ ID NO: 14152 - DNA, 219 bp, Bos taurus
  Clone ID: 60-LIB34-058-Q1-E1-G8
ggtgactgcggatccatccccacctcccgctctcacaggcagacatgagggcagagagactgtcccccctcctggctctggggctcctggtggctgggatccgcagtgtccactgcctcccagagaatgtggtggtgaaggaccagcgcagaagggtggatggccacacgttagcctccagcaacaccgacttcgccttcagcctctacaagcagttgg

SEQ ID NO: 14153 - DNA, 419 bp, Bos taurus
  Clone ID: 60-LIB34-061-Q1-E1-G8
cggacgcttggggaggacgagcccgtcagactggctcctgagcgagaattcatcacgtccctggtggcgattggcaaccggatggccacactccccaccatggagcagaagacacaacggctgatctcagaactctccctgctcaaccacaagctccctgcccgagtctggctgcccactgctggcttcgaccaccacgtggtccgcgtgccccacacccaggctgtcgtcctcaattctaaggacaaggctccctacctgatctatgtggaggtcctcgaatgtgaaaacttcgacaccactactgtccccgctcgaatcccccagaaccgatttcggagcacccagtctggttagaaacttgcccgaatgccgcatcacccacgagcagcgggcaggcagcttcagcaccgtgccca

SEQ ID NO: 14154 - DNA, 158 bp, Bos taurus
  Clone ID: 60-LIB34-062-Q1-E1-G8
attcgcctggatgaaatttgaccaacaaggtaacttgcgggccatcaatccagagaatgggttttttggcgtcgctccgggaacctctgtgaggacaaatcccaacgccatcaagaccatccagaagaataccatcttcaccaacgtggccgagacca

SEQ ID NO: 14155 - DNA, 345 bp, Bos taurus
  unsure (305): unsure at all n locations; Clone ID: 60-LIB34-064-Q1-E1-G8
ccacgcgtccagctcggagccccgggcccgccgacaccatgagttggtcctcgcaccctccgagtgtaatcttctacattccttcattgctttcttcagcatgcctggcatatgttgctacccgagacaactgctgcatcttagatgaaagatttggtagttattgcccaactacctgtggaattgcagatttcctgaataattaccaaaccagtgtagacaaagatctacgaactttggaaggcatcttatatcaagttgagaacaaaacatcagaagccagagagctggtcaaagcaatccanatcagctaataccctgatcaaccatcaaagccaaataaca

SEQ ID NO: 14156 - DNA, 200 bp, Bos taurus
  Clone ID: 60-LIB34-065-Q1-E1-G12
gccttttgaaattgatgaccaccagcaaatacactgtccctacgaccagctgcaggtctatgtcagcgggaggaacatcggtgagttctgtggaaagcaaaggcccgagcgcattgatgcccaaagcaactcggtggacctgctcttcttcacggacgagtcaggggacagccggggctggaagctgtactacaccagtg

SEQ ID NO: 14157 - DNA, 212 bp, Bos taurus
  Clone ID: 60-LIB34-065-Q1-E1-G8
aatgctgccaagctgaagataaaggtgcctgcctgctaccaaagattgaaactatgagagaaaaagtactgacttcatctgccagacagagactcaggtgtgccagtattcaaaaatttggagaaagagctttaaaagcatggtcagtagctcgcctgagccagaaatttcccaaggctgagtttgtagaagttaccaagctagtgacagat

SEQ ID NO: 14158 - DNA, 263 bp, Bos taurus
  Clone ID: 60-LIB34-066-Q1-E1-G8
cgacttcactcgctcgcagttcgctccgcgccctctgcaaccatgtctgacaaacccgatatggctgagattgagaagttcgataagtcgaaattgaagaaaacggaaacgcaagagaaaaatccactgccttcgaaagaaacgattgaacaggagaagcaagcaggcgagtcgtaatgaagcgtgcgccgccagtatgcactgtacattccacaagcattgccttcttattttacttcttttagctgtttaactttgtaaga

SEQ ID NO: 14159 - DNA, 204 bp, Bos taurus
  Clone ID: 60-LIB34-067-Q1-E1-G12
gcggaaaacatgcatagatgtcatatatctgattcctacccccaacccccacccttttcggtatatgtattaataatattattattattattattatttgtagttcatcagtttgctggtctctgcagtcagcagaaacaaatgggcaatatttgtcctgggagacccgggccgcccccgcccgggcctccccgcgcgtgagcg

SEQ ID NO: 14160 - DNA, 234 bp, Bos taurus
  Clone ID: 60-LIB34-067-Q1-E1-G8
ggcggtgacttcaatgagttcccagtccctgagcagtttaagaccctatggaatgggcagaagttggtcaccacagtgacagaaattgctggataagcgaagtgccactgggttccttgtcctctccctcacaccatgggataaatctgtatcaagacggttcttttttagatttcctctacctttctgctcttaaactgcttctctgctttgagaagcacagctacctgcctt

SEQ ID NO: 14161 - DNA, 211 bp, Bos taurus
  Clone ID: 60-LIB34-069-Q1-E1-G12
ggcggactcccgagcgagatggagtgggtgtgggcgctggtgctactggcggcgctgggcagcgcccgggcggagcgcgactgccgggtgagcagcttccgagtcaaggagaacttcgacaaggctcgcttcgccggcacctggtacgccatggccaagaaggaccccgagggcctgtttctgcaagacaaacatcgtcgccgagttcccc

SEQ ID NO: 14162 - DNA, 214 bp, Bos taurus
  Clone ID: 60-LIB34-069-Q1-E1-G8
ctctccgcttcctcctttcctcaggcatcaaagcagagaccacgggaacctagttcaccaggctcgaggctggaggccccgccatgacatccctaaggccccttctgatgctggccctgctggcgtgggttgttgtggctgaccaagagtcctgcaagggccgctgcaccgagggcttcaacgccaccaggaagtgtcagtgtgacgagctctg

SEQ ID NO: 14163 - DNA, 422 bp, Bos taurus
  Clone ID: 60-LIB34-071-Q1-E1-G12
cccgggccgacccacacgtccggggggacaaattctgggtatatcctcctgagaagggggaggaatatccaaagttgctccaagagaagtttcctggaatcccattcccactggatgcagctgtggaatgtcaccgcggagaatgctctcatgagggtgtcttcttcttccaaggcaaccacacgtggttctgggacttctctacaaaaaccataaagaaacgttcctggccagccgttgggaactgctcctcggccatacgatggctcaaccgctactactgcttccggggtaacaaattcctgcgcttcgaccccgtcacgggagaagtgaattccacttatcctcgggatgtccgagattactttatgtcctgccctaacagaggccatgcacataggaatgcaacccagcatatggat

SEQ ID NO: 14164 - DNA, 376 bp, Bos taurus
  Clone ID: 60-LIB34-071-Q1-E1-G8
actcaggtgcggactttctatttgaaagtgctgaatgaggagcagaggaaacgcctgtgtgagaacattgcgggccatctgaaagacgcacagctttttatccagaagaaagcggttaagaacttcagcgatgtccatcctgaatatggctcccgcatccaggctcttttggacaaatacaatgaggagaaacctaagaacgcagttcacacctatgtgcagcatgggtctcacttgtctgcaagggagaaagctaatctctgagggtcggaggcctggccctgcaccacgttgccgtccgcttgtgaagcagagcatggtgttcacacctgtacccacggatcgctggatggaagattctcctgcactagacatg

SEQ ID NO: 14165 - DNA, 273 bp, Bos taurus
  Clone ID: 60-LIB34-072-Q1-E1-G8
agagaccacgggaacctagttcaccaggctcgaggctggaggccccgccatgacatccctaaggccccttctgatgctggccctgctggcgtgggttgttgtggctgaccaagagtcctgcaagggccgctgcaccgagggcttcaacgccaccaggaagtgtcagtgtgacgagctctgttcttactaccagagctgctgtgccgacttcatggctgagtgcaagccccaagtgactcgtggggatgtgttccatctgccagaagatgagta

SEQ ID NO: 14166 - DNA, 415 bp, Bos taurus
  Clone ID: 60-LIB34-073-Q1-E1-G8
cccagccccagtctgtagctgcctcgagcagggagctggtggctcttccatccccagaccagccaagcctgtgagtgacaccccagacagaggaaccagagccatgcggagtctcagcggactgctgttgttactgactgcctgcctggcggtaaacgccagctccgtgcccacattgcccgatgacattcaagtgcaggagaacttcgacctgtctaggatctatgggaagtggttcaatgtggccgtgggctccacctgcccatggctgaagaggttcaaggagaagatgaccatgagcacagtggtgttgaaagcggggccgacgagcaaggagatcagcgtcaccaacactcacaggcggaaaggtgtctgtgaatcgatctctggtacttatgagaaaacaagcactgat

SEQ ID NO: 14167 - DNA, 410 bp, Bos taurus
  Clone ID: 60-LIB34-074-Q1-E1-G8
agattcctaattataacctttaccgccatggaactaatcttattttatattctatttgaagcaacactagtcccaacactcattattattacccgatgaggaaaccaaacagaacgcctaaacgccggactctatttcctattctatacactagctggctccctacccctattagtcgcactaatttatatccaaaacacagtaggatccctaaatttcctaatattacagtactgagtacaacctgttcataactcttgatctaatgtcttcatatgactagcatgtataatagctttcatagtaaaaataccactatatggcctccacctttgactacctaaagctcacgtagaagcccccatcgcaggctccatagtccttgcagcagttctactaaaactaagggg

SEQ ID NO: 14168 - DNA, 416 bp, Bos taurus
  Clone ID: 60-LIB34-076-Q1-E1-G12
cgacgcacgcgtcaggaggcctctctcctacccggataccgacgttatactgatgtgtttctccattgatagccctgatagtttagaaaacataccagaaaaatggactccggaagtcaagcatttctgtcccaacgtgcccatcatcctggttgggaacaagaaggatcttcgaaacgacgagcacacaaggcgggagctggccaagatgaagcaggagccagtaaaacccgaagaaggcagagatatggcaaacaggattggtgcttttgggtacatggagtgttcagcaaagaccaaagatggagtgagggaggtttttgaaatggccacgagagctgctctgcaagccagacgtgggaagaaaaaatctgggtgccttgtcttgtgaaacccctgctgcaagcacagccctc

SEQ ID NO: 14169 - DNA, 386 bp, Bos taurus
  unsure (224): unsure at all n locations; Clone ID: 60-LIB34-076-Q1-E1-G8
cgaaaaactttcagggaccctgtgaagcagctccagccgagatgtgcgaggaggaggacagcaccgccttggtgtgtgacaatggctctgggctctgtaaggccggctttgcgggggatgatgctcccagggctgttttcccatctatcgtgggacgtcctcgacatcagggagtgatggtgggaatgggacagaaagacagctacgtgggtgatgaagcacanagcaaaagaggaatcctgaccctgaagtacccgatagagcacggcatcatcaccaactgggacgacatggaaaagatctggcaccactctttctacaatgagcttcgtgttgcccctgaagagcattcaaccctctcaacgaggcgcccctaaacccaaggc

SEQ ID NO: 14170 - DNA, 343 bp, Bos taurus
  unsure (20)...(21),(29),(32)...(33),(35)...(36),(47),(72): unsure at all n locations; Clone ID: 60-LIB34-077-Q1-E1-G8
tatagagagtcgtattaggnntttttcantgnnannggggctggtgngcatgtgcccagggcagtgtttgtngacctggaacccacagtcattgatgaggtgcgcactggcacctaccgggagctcttccaccctgagcaacttatctcaggcaaagaagatgccgccaataactatgcccgaggtcactacaccattggcaatgggattattgacctcgtcttggaccgagttcggaaactggctgaccattgcacaggtcttcagggcttcttggttttccacagctttggtgggggaactggttccgggttcacctccctgctgatggaacgcctcctct

SEQ ID NO: 14171 - DNA, 441 bp, Bos taurus
  Clone ID: 60-LIB34-078-Q1-E1-G12
tatagagagtcgtattattggccgtagcattccttacgttagtggaacgaaaagttctaggctatatacaactccgaaaaggtccaaatgtcgtaggtccatatggcctacttcaacccatcgccgatgcaatcaaacttttcattaaagaaccactacgacccgctacatcttcagcctcaatatttatcctagcacctatcatagctttaggcctagccttaaccatgtgaattcccctaccaataccctatcctcttatcaacataaacctaggagtcctatttatactagccatatcaagcctagccgtatactccattctctgatcaggctgagcttccaactcaaaatacgcactaatcggagccctacgagcagtaacacaaacaatctcatatgaagtaacgctagcaattatcctgttatcagtactcctaa

SEQ ID NO: 14172 - DNA, 442 bp, Bos taurus
  unsure (386): unsure at all n locations; Clone ID: 60-LIB34-078-Q1-E1-G8
actcgtagaaccacgcgtccggtcaccagccctgacctaggacagtgaatcgataatggcactctccatcacgcggggccttctgctgctggcagccctgtgctgcctggccccgagctccctggctggagttctccaaggacacgctgtccaagagacagatgatacatcccaccaggaagcagcatgccacaagattgcccccaacctggccaactttgccttcagcatataccaccatttggctcatcagtccaacaccagcaacatcttcttctcccccgtgagcatcgcttcagcctttgcgatgctctccctgtgagccaagggcaacactcacactgagatcctgaagggcctgggtttcaacctcactgagctcgcanaggctgagatccacaaaggctttcagcatcttctccacaccctcaaccaaccaaac

SEQ ID NO: 14173 - DNA, 444 bp, Bos taurus
  Clone ID: 60-LIB34-079-Q1-E1-G12
ccggctcgacccaagcgtcagcgccaccagcagactataacaatcccagccaggtcctcggtggcggtgccttacgtcattgtgcccctgaagatcggcctccacgaggtggaggtcaaggctgccgtctacaaccacttcatcagtgatggtgtcaagaagaccctgaaggtcgtgccagaaggcgtaagagtcaacaaaactgtggctgttcgtacactgaatccagaacatctgggtcaagggggagtgcagcgagaggaagtcccagctgcagatcttagtgatcaagtcccagacaccgagtcagagaccaagatcctcctgcaggggactccggtggcccaaatgacggatgacgccatcgacggagagcggctgaagcaccttatccaaaccccctccggctgtggggagcagaacatgaatggtatgagcccaccg

SEQ ID NO: 14174 - DNA, 433 bp, Bos taurus
  unsure (374),(422): unsure at all n locations; Clone ID: 60-LIB34-079-Q1-E1-G8
acctcctctgcatgaccctgctctctctgcacccagactgcatgaagacgctgtcacaagagtcagggatccaacaacaggccttgagaaatgtggctcttatacctcctgctgccagtcctgttctacagggtgggaggcgccacacccacccctcagaagctctatggggaggtgatgtccccgctgttccccaagccttaccctaacaattttgagaggaccactgtgatcacagtacccacggggtacaaggtgaagcttgtcttctggcagtttgacctggagccttcggaaggttgtctctatgactatgtcaagatttctgctgataagaagaccatggggaggttctgtgggcagctgggttctcncctgagcaatcccccaggaaggaaggaattcatggtccaagggaacangatgctgctga

SEQ ID NO: 14175 - DNA, 331 bp, Bos taurus
  Clone ID: 60-LIB34-080-Q1-E1-G8
agctttcgcctcttgactgatctcctcaacacgcggcgtccaaagaactatccgccggggcccccgcgcctgcccttcgtatgcaacttcatccaactggactttgaccatggacacctgtcgcttcagcggtttgtgaagaaatacgggaacctttttagcctggaattcggtgacatgccttcagttgttataactggattgcccttaatcaaagaagtccttgtctaccaggaccaaaactttgtgaaccgccccataagccctattctagaacgtgtttttaacataaatggcttgatcatgttcaatggccacatatggaaagagc

SEQ ID NO: 14176 - DNA, 417 bp, Bos taurus
  unsure (396): unsure at all n locations; Clone ID: 60-LIB34-082-Q1-E1-G12
agggggcctctccagctcaccatggctcgggcattgagagtgccagttgcactgtggctgttgggcttgtgctggtctttggctaaagcccaccctctggctagagctcctgagcttgggcacggagttgaaggtgggaatgtggccaagccggatccagaagtgacggaacgctgctcggatggctggggctttgatgctaccaccctggatgagcatgggaacatgctgtttttaaaaggggagtttgtgtggaagggtcatgcctgggcccggcagttgatctcagagaggtggaaggatgcccccagtcccgtggatgctgcattccgctatgatcgtaacagtgtccttctgatcaagggggacaaattctgggtatatcctcctgagaanggggaagaatatcaaagttgc

SEQ ID NO: 14177 - DNA, 402 bp, Bos taurus
  unsure (324),(353): unsure at all n locations; Clone ID: 60-LIB34-082-Q1-E1-G8
gaaaatgtacagacttcatctgccaaacagacactcaggtgtgccagtattcatgaatttggacaaagagctttagaagcatggtcagctagcacgcctgagccagagatttcccaacgctgagtttgtacaagttaccaagctactgacagatctcacaagagtccacaaggaatgctgccatagagacctacttgaatgcgcatatgacagggcatatcttgcaacgtacatatgtgataatcacgatacaatctccagtacactgaagcgaatgctgtgataaccctttgtatggaatatctcactgcattgctgacgtanactatgatgccatagctgataacctgccntcattaactgctgacattgctgaagataacgatgtatgcaacaactatc

SEQ ID NO: 14178 - DNA, 399 bp, Bos taurus
  Clone ID: 60-LIB34-083-Q1-E1-G12
gacaaacgcgtcaggagccaaggtgtggatgttggagtgttgtttttgttctcttttttacagaaactttgaaaaaaaaaacactgtaggtctcccccatgacaatgtcttccattaagattgagtgtgttttgcgggagaactgccactgtggtgagtctccagtgtgggaggaggcgtccaactctctgctcttcgtagatattcctgccaaaaaggtttgccggtgggattctctcagcaagcaagtgcagcgagtgaccgtggatgcccctgtcagctctggtggcccttcgcagtcgggaggctatgttgccacagttggaacaaagttctgtgctttgaactgggaagatagtcaacagttgtctgggcacaatagataaagagaagaaaaac

SEQ ID NO: 14179 - DNA, 387 bp, Bos taurus
  Clone ID: 60-LIB34-083-Q1-E1-G8
acgaggaccatgtatcggatgtaggacgcgctgtcaagcagtgacttcagctgctggcagcattgtgcgacgtgctagccatcacggatgggtggagttctacgacgatttggctgtctcattagagtgatgtgtcatgtcaacagctgagcattgtgccagattcattgctctgagactcggtgtctttgcatccagcatatactacgatgttggctcagcagtctagcttcagcagtatctccttctgcctgatgagcactgactgtatctatgctatgatctcactgggaggtactggctataatcacactgaaatcttgaacggactgtgtcatatactcactgggctctcaggggctgagatgcatatgtgctttcagcatc

SEQ ID NO: 14180 - DNA, 402 bp, Bos taurus
  Clone ID: 60-LIB34-084-Q1-E1-G8
aagctttgggtggcttcagggacaccagggagaaagatgtgtcccttacagcctttgttctcatcgcgctgcacgaggctaaagacatttgcgaggcacaggtcaacagcctgggccgcagcatcgctaaggcaggagacttcctcgaaaaccactacagagagttgcgaagaccatatactgtggccattgctgcctatgccctggctttgttgggcaagctggagggtgaccgcctcaccaaatttctgaacacagccaaagaaaagaaccgctgggaggaacccaaccagaagctctacaatgtggaggccacgtcctacgccctcttggctctgctggcacgcaaagactacgacactacgcctcctgtcgtgcgctggctcaacgagcagagatact

SEQ ID NO: 14181 - DNA, 408 bp, Bos taurus
  unsure (372): unsure at all n locations; Clone ID: 60-LIB34-085-Q1-E1-G8
agcggacgcgtgggccggcgtgacccacccgccatgctccccccagcgctcgtcttgctgttggggtttctctgccacgttgctatcgcaggacgaacctgccccaagccagatgagctaccgttttccacggtggttccactgaaacggacctatgagcccggggagcagatagtcttctcctgccagccgggctacgtgtcccggggagggatccggcggtttacatgcccgctcacaggactctggcccatcaacacgctgaaatgcatgcccagagtatgtccttttgctgggatcttagaaaacggaacggtacgctatacaacgtttgagtatcccaacaccatcagcttttcttgccaaacgggngttttatctgaaaggagctagttctgcaaaatgcac

SEQ ID NO: 14182 - DNA, 470 bp, Bos taurus
  Clone ID: 60-LIB34-086-Q1-E1-G8
ggtcggtattccgggtggcccacacgtccggcaagaaagtcttactttgatcatcatttatttgaaatcagcagtattcccaacttttgtgaagttgtgtgtgtgtgcttcccatgtaacgtctccagtcttctggcatggattatatttaccgcttgccattttattcattgtagtcttgccaagcgcatcagtatgtgttttagaatgaatcaatagttgtatgagtatgttggtggtaagttacgagaagtggacattgttaggtttattctctgctctgtacctgtgaaaagagtagcaacaaaactgcttggcagtatgatttttaaattgtgttaaaacataagctgtttcagaaaaatatgacagatgtatggctgccttttgatatatttgaagccttgtcctacaggatactgctcaaaacatggctgtcctagaattgtaaaaattgtataaacaagtca

SEQ ID NO: 14183 - DNA, 205 bp, Bos taurus
  unsure (166): unsure at all n locations; Clone ID: 61-BOVMS1-001-Q1-E1-H2
atgcgacgtcatagctcttctatagtgtcacctaaattcaattcactggccgtcgttttacaacgtcgtgactgggaaaaccctgccgttacccaacttaatcgccttgcagcacatccccctttcgccagctggcgtaatagcgaagaggcacgcaccgatcgcncttcccaacagttgcgcagcctgaatggcgaatgggacg

SEQ ID NO: 14184 - DNA, 314 bp, Bos taurus
  unsure (290): unsure at all n locations; Clone ID: 61-BOVMS1-003-Q1-E1-H10
ttgatatggttcctggcaagcccatgtgtgtcgagaagctctctgattaacctcccctgggccgtttttgctggtgcgtgacaatgaagacaagacaagtcgcctgtggggtgtcaacaaagcagtggacaagaaagcaactggagctggcaaggtcaccaagtctgccaagaaagctcagaaggctaaatgaatattatccccaatacctgccaccccagtcttaatcagtggtggaagaacggtctcagaactgtttgtctcaattggccatttaagtttaatagtanaagactggttaatgataacaatgc

SEQ ID NO: 14185 - DNA, 311 bp, Bos taurus
  unsure (85): unsure at all n locations; Clone ID: 61-BOVMS1-003-Q1-E1-H2
tgatgctctgcggggccaggaggacttgaaggagcagctggccatggtggagcgcagagccaacctgctgcaagctgagatcgangagctgagggccaccctggagcagacagagaggagcacgaagatcgcagagcaggagctcctggatgccagtgagcgcgtccagctcctgcacacccagaacaccagcctgatcaacaccaagaagaagctagagacagacatcacgcaaatccagggagagatggaggacattctccaggaagctcgcaacgcagaagagaaagccaagaaggccatcactgatg

SEQ ID NO: 14186 - DNA, 427 bp, Bos taurus
  unsure (245): unsure at all n locations; Clone ID: 61-BOVMS1-004-Q1-E1-H2
ccttcgggacaaggatgttgttttggaaagtagaccaacagaaaatcctactgcacacagcaatctttacatcttggctggacatgaaaatagttactaagcaacagaaactggtctcaaatgacaggaaaatgaatatactccactgaaaggaaaaatatcttgaggaaattcagtacaaactatactatgatttgctttaattgttatgagttatatctcaaatgatctgtactttaaggtangattcagtattttctgtagctggaaacagctattctatctcttgccactatgtggtggtttttttcaagtttgcttaataaaagctatgagacaaatagtcctctagttccaggaaacacagtccttttaaaaaaaaataatgtttgtaacaaaggtgccattgaaaattttagataacaac

SEQ ID NO: 14187 - DNA, 326 bp, Bos taurus
  Clone ID: 61-BOVMS1-005-Q1-E1-H10
acaaagcaacagcaggatgaaatcaaagggcggtgtcccctgtgctacagaccatgtgaatgcagcatgaccttatcgccaggttggcgatgtccttcgggctctgggcacaaagcccagtcagtgcaacaagtcacgaaagtgctgggaaactgcagcaatgcagatatgactgccagcaacactgagttcgtacaatttctgcgcatgttgcaagctatgtccaacaccatcgaccatcgcacttatcaagaacttgttgacggtctgcgtatcctccataaagcaggcaatggcaccgtcatgggtgcggaacttcgtcaagt

SEQ ID NO: 14188 - DNA, 364 bp, Bos taurus
  Clone ID: 61-BOVMS1-005-Q1-E1-H2
gtccgctttacaagttagtctaaaaaggtacagccttttagaaacggatacaaccttgactagagagtaaaatttaacactaccatagtatgcctaaaagcagccatcaattaagaaagcgttaaagctcaacaacagaaattaaatagattccaacagcaaatgattaactcctagccccaatactggactaatctattatagaatagaatcaataatgttaatatgagtaacaagaaaaattttctccttgcataagtctaagtcagtgcctgataatactctgagcactaacagtcaataaaaataatccaacaattaacaatttactgattatactgttaacccaacacaggagtgcatc

SEQ ID NO: 14189 - DNA, 371 bp, Bos taurus
  Clone ID: 61-BOVMS1-006-Q1-E1-H2
gtccgctcaaattgatagaggacaatatgatggaatacttgacctcattgaaagtgggaagatagagggggccaagctggtatgtggcggaggcccttggtggaataaaggctactttatccaacccacagttttctctgatgttactgatgatatgcgcattgccacagatgagatatttggacctgtgcagcacctcatgaagtttaagtctttatatgatgtaatcaatagagcatacaatacattctatgggttatctgcacgaatatttaccaaagatattgattaaggcatcacaatctcctctggttttcagtctggaaacgtgttgggtaaatgccaatatgtggtatctgccaattgcccct

SEQ ID NO: 14190 - DNA, 408 bp, Bos taurus
  Clone ID: 61-BOVMS1-007-Q1-E1-H2
tgtacattatttgcgcagttttgatgctcttccgcggcggcgtcgatgcgcttttgatgcgggcgcagctgacggctccgaatatgaaatttcttgatgcccagcactacaatgaaatttttacgacgcacgggacgattatgattttgtttatggcgatgccgttcatcatcggcttgatgaacatcgtcgttccgctgcaaattggggcgcgcgacgtcgcgtttccgtatttgaatgcgttaagcttttggctctttttcttcggtgcgttgctgtttaacatttcattcgtcatcggcggatcgccggatgccggttggacggcgtacttcccgcttgccggcaacgaattcagccctggcgtcggcaacaactattacgctgtcgctttacaaatttccggga

SEQ ID NO: 14191 - DNA, 179 bp, Bos taurus
  Clone ID: 61-BOVMS1-009-Q1-E1-H2
caaccggccgcccttttttttttttttttttttttttttttttttttttttttttttttttttttttttttttttttttttttggaaataaccgtgtttaaggctaaacataatggggtaaccaaacccaatttgggtcctaactaaaatggcttcggtaatttaaggtaaaattccaa

SEQ ID NO: 14192 - DNA, 287 bp, Bos taurus
  unsure (221): unsure at all n locations; Clone ID: 61-BOVMS1-010-Q1-E1-H2
taaagtgaatcatactgttaaaagaagtaacatgatatgctgggaagcatactaagctaaggatcaagaacttggtttcaatctgggttttgctattaatgtgctgcatgaccttgggaaaatcatctcccctacaagagggtggtggactagactatctcaaagaacccttttcaactctaaaaatttatcctgtcaactggagagcctacgaagcatanggaatagagaaaagggaagtgttttcagttttcctttttaattttgatatgcttaaatatgaatgt

SEQ ID NO: 14193 - DNA, 343 bp, Bos taurus
  Clone ID: 61-BOVMS1-011-Q1-E1-H10
cagaaagagtcaactctgcaccgggtcctccgccccaaaggtgggatgcaattctcctgaaaaaccttgccgggcaagacatcaccctgaaggtggacccagtgacacaatccagaacgtcaaagcaaagatccaagacaaagagggcatcccccaagacaagcagaggctgatctttgccgggaaacagctggaagatggccgcaccctgtctgactacaacatccagaaagagtccactctgcacttggtcctgcgcttaaagggaagtgttttaagttctcccttttaagctttcgataagttacattgcacttttccttcaataaagttgttgcattcc

SEQ ID NO: 14194 - DNA, 397 bp, Bos taurus
  Clone ID: 61-BOVMS1-012-Q1-E1-H2
tgggagaatagaacagcagcaaatactgtagacttacagttttcattatttttttctttatgtatacaaaagtttatctaactacaatttggtgttcatgaaaatcatttagttgacaaggtgcctattccattgttgaattttctttaaatatattttgacaataaatttgctaattaaaaattaaaaaaaaaaggatctggaaacaaaaacctaccagcaatttgctaaaggtacagaatcactgttagtatcctttattaataagtcccttttctctaatgtgaactaaaaattagtgctatctgagcagggatgaaatctgacatggttaagggaaaatgtatacaaatatacgtatatatttttttcatgagcagtatggcaataggacact

SEQ ID NO: 14195 - DNA, 255 bp, Bos taurus
  Clone ID: 61-BOVMS1-013-Q1-E1-H10
ctccattccattttctctatgggaagcagggccagcaggaggagcagaaattgccaacactgcaaagccaggctgggtgcagcctaggagagccctcaccacatccgctgcccatcctggcacttgcttcatccttctatatccatccactcctccctctactgtcggcctccacactctctgctgcttaataaactccatttggtctccagaaaaaaattcacaaaaatcaaagagatataaaagacattgagc

SEQ ID NO: 14196 - DNA, 317 bp, Bos taurus
  Clone ID: 61-BOVMS1-016-Q1-E1-H10
gcgtccgggaagaactttaaaaattaaaaaaactggttttctgaaaaaaaaaaaaaaaaaaaaaaaaaaaaaaaaaaacacaaaaaaaaaaaaaaaaaaaaaaaaaaaaaaaaaaaaaaggaaaacagcccaaaagggataaaaactaaaaaagggggggacgcccaaaaagatccaacctaaagtacccactaaagtaaattcaaaggccctcaattttgcaacctaattccagtaaaaagcccgtcgtttaaaaacttattcactgggaaaaccatgccctttcccaaattagcccctttgcaaaaaaaccccct

SEQ ID NO: 14197 - DNA, 170 bp, Bos taurus
  unsure (18),(141): unsure at all n locations; Clone ID: 61-BOVMS1-018-Q1-E1-H2
tctgattttaatgctganagagcagcaagagagaagattcatggaagaaaagagcagctggcattgcagctggcagttctactgaaagaaaacaatgctttcgaagatggaggcagcaagcagaccttgatggaaatgcanagccgtcacggggcgagagcaagtgacgc

SEQ ID NO: 14198 - DNA, 421 bp, Bos taurus
  Clone ID: 61-BOVMS1-019-Q1-E1-H10
gaaacttggaaggtgtctggggatagcgtgaagggggttgtgactgtggactgaagaaaccacaccaactgattgctccgtctagaaacttttctggcacaaattacatgacatgttaacaaaggaaacaggaatcatttcaaataaactgcttagcaatcttcagtcttagggcggttggtagtattttaaacctctctaacaagataaaggaagtcaccaaaaatatttgcaaaatggtctaattgttgatagcaaaccaaaaccaaactgttaatcaaacatacaaaacttcagggacagcatgtttggtggatttgtacccttctagcaaatttcaccttgggtttgttttgtaaatgttctataagaggtattgtccacagacttctaggctaagctgtttttacaagaagtattt

SEQ ID NO: 14199 - DNA, 303 bp, Bos taurus
  Clone ID: 61-BOVMS1-019-Q1-E1-H2
atgcgacgtcatagctcttctatagtgtcacctaaattcaattcactggccgtcgttttacaacgtcgtgactgggaaaaccctggcgttacccaacttaatcgccttgcagcacatccccctttcgccagctggcgtaatagcgaagaggcccgcaccgatcgcccttcccaacagttgcgcagcctgaatggcgaatgggacgcgccctgtagcggcgcattaagcgcggcgggtgtggtggttacgcgcagcgtgaccgctacacttgcaagcgccctagcgccggctcctttcgctttc

SEQ ID NO: 14200 - DNA, 362 bp, Bos taurus
  unsure (307): unsure at all n locations; Clone ID: 61-BOVMS1-021-Q1-E1-H10
atgcgacgtcatagctcttctatagtgtcacctaaattcaattcactggccgtcgttttacaacgtcgtgactgggaaaaccctggcgttacccaacttaatcgccttgcagcacatccccctttcgccagctggcgtaatagcgaagaggcccgcaccgatcgcccttcccaacagttgcgcagcctgaatggcgaatgggacgcgccctgtagcggcgcattaagcgcggcgggtgtggtggttacgcgcagcgtgaccgctacacttgccagcgccctagcgcccgctcctttcgctttcttcncttcctttctcgccacgttcgccggctttccccgtcaagctctaaatcgggggct

SEQ ID NO: 14201 - DNA, 231 bp, Bos taurus
  Clone ID: 61-BOVMS1-021-Q1-E1-H2
ccgagggaatgccccagagccggaggtggggaggctcttaacagcgtgtcaaccccccgccttcctgtttttagtccgattcagatcttgagcagcttcatgcaactatttatttttgatgacagacgcccgtctaaagtttctctcttgcctgttcatttcactggtggctgaaggatttgaaaaaaatccttctgctcttacaaggaaaataagaattcaggttcagtg

SEQ ID NO: 14202 - DNA, 444 bp, Bos taurus
  unsure (370),(390): unsure at all n locations; Clone ID: 61-BOVMS1-023-Q1-E1-H2
acgcgtccggtatggtacttagtcgctgaaatgctggaggagtaagaggaagggtgaggggaagggctcttggctaatagctcccattatctggaagacagttttaggttttaactataggtctgtatgtgcatttttgtgaagtacctatgtttattgtggacaagcttcattactttgcaacatctaggctttttagatgtcctgaggtgacaatgtatgatataaagtagagctagtgaattaaccaatttgtaaatatctttgttagaattgattttttttaaaaggcagcatcttggacctggaattattataccttctctgagaactgtacatcaggacttgctcatctaggttggcaactgangggaagaaggaagtctaganggaaggctgtgtgtggatgtgctcatgtttatattttgatgataaccattgatg

SEQ ID NO: 14203 - DNA, 312 bp, Bos taurus
  Clone ID: 61-LIB188-001-Q1-E1-H2
ctccaggcagccatggccgacccacctattacaacaagcttgatacttgtatcggcttctatcaggcgcgataaagaggaccgaatgctgagcaaactctgccacaaacatacctgccgctgtgcagaggagaactgcttcaatcagagacggtgaacgacgtcactctggcagaccggcttgacaaggcttgcgaaaccggcgtgcactatatatacactcttcacacgaccacaaatttcaaccagttacccaagttcttaactataagtcactctggacatggcagccaggaatcatgggaacatccca

SEQ ID NO: 14204 - DNA, 355 bp, Bos taurus
  unsure (328): unsure at all n locations; Clone ID: 61-LIB188-002-Q1-E1-H2
tggccgcgggatactcctaatacaacctggatgaaacttgtatccgcttctatcacccggataaagaggacggaatgctgagcaaactctgccacaaagatacctgccgctgtgcagaggagaactgcttcatgcaccacacggagaaggaggtcactctggaggaccggctggacaaggcttgcgagccgggcgtggactatgtgtaccctcttccccaaaccagaagtttcaaccagttacccaacttcttaactatacacccagctggccagggcagccagcagtcatgggagcatctcacctgtctggaaaaggttctgcatangcgtggcttctccctggactcctctgc

SEQ ID NO: 14205 - DNA, 433 bp, Bos taurus
  Clone ID: 61-LIB188-003-Q1-E1-H10
acaagatgaatagcaatgccctcaaggaggtgaaacagataaagacccaaatagaacaaaccaatgaagagcgcaaattactgctcagctccctagaggaagccaagaagaagaaagaggacgccctgaatgacaccagggattctgaaaacaagctgaaggcgtcccagggggtgtgcaatgagaccatgacagtcctttgggaggaatgtaagccctgcctcaagcagacctgcatgaagttctacgcgcgggtgtgcagaagcggatcgggactggttggccaccagcttgaggagttcctaaaccagagctcccccttctacttctggattaacggtgaccgcatcgattccctgatggagaatgaccgggagcagagccacgtgatggacgtcatggaggacagcttcacccgggcgttcagcatcat

SEQ ID NO: 14206 - DNA, 404 bp, Bos taurus
  Clone ID: 61-LIB188-003-Q1-E1-H2
ccatcgcggccggatacaaaggatagaacgtgggccgctgccctgacccgttactgcggcgtttcacaaaggaggctttcccccctcttcccccctgcaactcccaagcgaggctctgcacctcccacctcaaaacctacagcctcttcaaaaccaaggcctttccacagcgtagtgcctagtgttctcagcccaacaatgcaacttattgcacagggtattttggcaactctgagcaagaataggggctttgaaaaataatgctttaaggaagcttgtcattttagggctgaactttaatagaatgtgaaaagtttgaactcttacactttaaacaaacaaaacctagaaattactgattggttcaaaacggttttatggaaaaactaatctgtaacaaaaac

SEQ ID NO: 14207 - DNA, 392 bp, Bos taurus
  Clone ID: 61-LIB188-005-Q1-E1-H10
gggacacacagtcaatgacagagccgagaacaagggcacttgccaatttcgagttaaagtaagagtgagacgctgcggcaagctccatgccccagagaacggctacatgaagtgctccagtgacggcgataattatggggctgtgtgtgaattctcctgcgtcggaggctacgagctccaggggagctctgcccgagtatgtcagtccaacctggcttggtctggcactgagcccacctgcacagccatgaatgtcaatgtcggcgtgagaacagcagctgcacttttggatcagttttatgagaaaaggagactgttcattgtgtccacccccacagcccgaaacctcctctaccggctgcagctggggatgctccagcaagcacagtgtg

SEQ ID NO: 14208 - DNA, 413 bp, Bos taurus
  Clone ID: 61-LIB188-005-Q1-E1-H2
aaagaattcatcctgatactgcgctgctggacctgcaaaacaacaaaataactgagatcaaagatggagactttaagaacctgaagaaccttcatacactgattctcatcaacaacaaaattagcaaaatcagccctggggcatttgctcctttggtgaaattggaacgactttatctttccaagaatcaactgaaggaattgccagagaaaatgcccaaaactcttcaggagctgcgtgtccatgagaacgagatcaccaaagtgcgaaagtctgtgttcaatggattgaaccagatgatcgtcgtagaacttggcaccaacccgctgaagagctcaggcattgaaaatggagcctttcaaggaatggagaagctctcctacatccgcattgctgacacaaatataactacc

SEQ ID NO: 14209 - DNA, 389 bp, Bos taurus
  Clone ID: 61-LIB188-006-Q1-E1-H2
ggcccgggatacaagctttttttttttttttttttttttttgttttctatgaaatagtttattttactgtttactatggaggggctacaaatacgtatctgacaggaacaccaaggactaagatttgcaacactggtgaaaatggctatgaagacttcagactccaagcacgagtccaatgactttgagaagctgttgcctcacaaggtctttgaaggaaatcgcccgaccaactctatagtgttcaccaaactcacgccattcattcttggagccttgattgccatgtatgagcacaagatcttcgttcagggcatcatctgggacatcaacagctttgaccagtggggagtggagctgggaaagcagctggctaaaaaaatttaacc

SEQ ID NO: 14210 - DNA, 372 bp, Bos taurus
  Clone ID: 61-LIB188-007-Q1-E1-H10
ggccgcgggatacttgagctggacagagtcactcgagcccctccagggagctgtggctaaattcttctctgccagctgtgttccctgcattgatagacaagcataccccaacctgtgtcaactgtgcaagggggagggggagaaccagtgtgcctgctcctcccgggaaccatacttcggttattctggtgccttcaagtgtctgcaggacggggctggagacgtggcttttgttaaagagacgacagtgtttgagaacttgccagagaaggctgacagggaccagtatgagcttctctgcctgaacaacagtcgggcgccagtggatgcgttcaaggagtgccacctggcccaggtcccttctcatgctgt

SEQ ID NO: 14211 - DNA, 250 bp, Bos taurus
  Clone ID: 61-LIB188-008-Q1-E1-H2
gggatacattgtgtactcattttttttttttttttttctttttttttttttttttttttgttttttttttttttttttgttttttttttttttttttttttggtttctttttttttgttttttttttttttttttttttttttgttgtttttgtttgttcgcctgcaagtctttcattttctatagttgccatcagtggggggggttctggctctcccggatctgtgggtcgtctttgtgcgcgtggggg

SEQ ID NO: 14212 - DNA, 458 bp, Bos taurus
  Clone ID: 61-LIB188-009-Q1-E1-H2
gccaagggcgcgggatacacgggcaagatgggccgcctgaagagctacgagaaccagaaaccccccttcgacgccaagaacccattcctggctgttgtcaccaccaaccggaagctgaaccagggaaccgagcggcacctcatgcacctggaattagacatctcggactccaaaatcaggtatgagtctggggaccatgtggctgtttatccggctaatgactctgccctggtgaaccagcttggcgagatcctgggtgccgacttggacatcatcatgtccctgaacaaccttgatgaggagtccaacaagaagcaccccttcccctgccccacctcctaccgcacggccctcacctactacctggacatcaccaacccgccacgcaacaacgtgctctacgagctggcgcagtactttgcgcgaggattccagatgctgggcccctttcacatcat

SEQ ID NO: 14213 - DNA, 432 bp, Bos taurus
  Clone ID: 61-LIB188-012-Q1-E1-H2
cgcgggagacttgagctggacagagtcactcgagcccctccaggtagctgtggctaaattcttctctgccagctgtgttccctgcattgatagacaagcataccccaacctgtgtcaactgttcaagggggaaggggaaaaccaattttcctgctcctccccggaaacatacttccgttattctggtgccttcaaatttcttcaaggacgggctggagacgtgggttttgttaaagagacgacagtgtttgagaacttgccagagaacgctgacatggaccagtatgagcttctctgcctgaacaacagtcgggcgccagtggatgcgttcaaggagtaccgggaggcgctggagaagggtgatgttacagctcagatagctctgcagcctgcgttgaagttcaacggtgggggccatatcaatcacagcat

SEQ ID NO: 14214 - DNA, 416 bp, Bos taurus
  Clone ID: 61-LIB188-013-Q1-E1-H10
accaaaagaccttcctcctgatactgcgctgctggacctgcaaaacaacaaaataactgagatcaaagatggagactttaagaacctgaagaaccttcatacactgattctcatcaacaacaaaattagcaaaatcagccctggggcatttgctcctttggtgaaattggaacgactttatctttccaagaatcaactgaaggaattgccagagaaaatgcccaaaactcttcaggagctgcgtgtccatgagaacgagatcaccaaagtgcgaaagtctgtgttcaatggattgaaccagatgatcgtcgtagaacttggcaccaacccgctgaagagctcaggcattgaaaatggagcctttcagggaatgaagaagctctcctacatccgcattgctgacacaaatataacta

SEQ ID NO: 14215 - DNA, 401 bp, Bos taurus
  Clone ID: 61-LIB188-013-Q1-E1-H2
acactcctgcccggggccgacgcggacctggacttagtatcacggaacctgctggggttttcccacaacacagattgagagtcagactctcccctgccccgaagacgagcctggttagctcctgaatccaaagatgcccttgatgtatccggtgaaggcgctcttggccttctgcgccaacttgtcctcgaggggtgggaaagcgacgtgggtgagggccaggtcaaagaagaaaggcttgcaggggatgggctggaatcctggcgggaagtgcaccaggttggcttgcttggtgacgagggaagggtccaggcagaaggcctcaaaccgttcaaccaagggcttattgtccttgacttgggaagaggtttctgtctgatgggcatcgtttgtatccagga

SEQ ID NO: 14216 - DNA, 395 bp, Bos taurus
  Clone ID: 61-LIB188-014-Q1-E1-H2
ccaaggccgcgggataccagtgttgtccagtggggcccaggtgcgccagtgggccaggtccagtgtctgccctatatcttctcccagcctccccaagggatggctcaaggaggtcagagaggatcccatccacagggccagctgggtgggcggcaggggcttctaggagaggagcaggaaggaggcatgagagcgtgtccggggaagggagggcatcagctccctggcaggcccagcccaccttcagccacactgcctctcagaggtgaagggaggtcaggagggagaatggagtgggggtgccgtaagctcctcttgtttagtgccactagcctcccctgaatcccccggatgggggcggctgggtgttgtgagtcacactgtgttgaccgcat

SEQ ID NO: 14217 - DNA, 421 bp, Bos taurus
  Clone ID: 61-LIB188-015-Q1-E1-H10
ggcacggtcgtgtggtgtgccgtgggacctgaggagcagaagaagtgccagcagtggagccagcagagcggccagaacgtgacctgtgccacggcgtccaccactgacgactgcatcgtcctggtgctgaaaggggaagcagatgccctgaacttggatggaggatatatctacactgcgggcaagtgtggcctggtgcctgtcctggcagagaaccggaaatcctccaaacacagtagcctagattgtgtgctgagaccaacggaagggtacttgctgttgctctgtttggaggcccaggtggtctccacgttgcgggtgatggtgctgccgtctgccttccagaccacggtcacgctacccgggtagaagtcgctgatgagacacaccagggtggccttgttgccgttgagctcctccg

SEQ ID NO: 14218 - DNA, 391 bp, Bos taurus
  Clone ID: 61-LIB188-017-Q1-E1-H10
tccaaagaactcacaaggaatcctggcggttccccaaacccaacttcccccaacgggccgttccgtccaagtatagtaagggcaataacgttggccttaaaacaaaccaggtccggcccccaaaagccgaagggggtttggaaaaggtgcttaaccggccctccgtcaatggcttcccccgtcatttgggcaaccgaattcccctgcaggaggatcttggcctctaacccggtgtcggggacttgatcactaagatctgcagctgggaactcctctcgctgcactcccccttgaccaagatgttctggattcagtgtacgaacagccacagatttgttgactcatacgcattctggcacgaccttcagggtcatcgttgacacatcactga

SEQ ID NO: 14219 - DNA, 314 bp, Bos taurus
  unsure (151),(250): unsure at all n locations; Clone ID: 61-LIB188-017-Q1-E1-H2
ggctgtcggcaacttattggaaaaaagaattttgcaaaatccccaaaactttcataaggagaaaaccctaaaggacaacctaaggaattatcccaattggaaaaaagcacaaaggactttctaaaccccccaaaaagcaaaggggcccgangccaccagatgcctccatgggagcccctgagcattcaccagcctgcctgggattccgaggacgtcagcaacttcaaagacacaggtcctcagcatgaangaaggaacccccagctgaactgacaatgacgatggccgcctccctcaaagaagcaaaacaaaat

SEQ ID NO: 14220 - DNA, 426 bp, Bos taurus
  unsure (231): unsure at all n locations; Clone ID: 61-LIB188-018-Q1-E1-H2
gataccaattcgaaggctcaacctgggctccccggccaaccttcaacaaaagttgattaaccagccaggattagaccaatccgggccccccaattgccaaccgcaatggctccaaaatgaactggcaacaaatccttagcattgctgcatgaattaatcaaaagtataaatttgccgtggcaaatgtatacacctcatgctagcctcatgaaactggaataagcctttganaagaaatttgtccttgaagcttgtatctgatatcagcactggattgtagaacttgttgctgattttgaccttgtattcaagttaactcttaccttggtatatgtttaataacccggtcataacctttgatttaaacccctagttatatgcggctctctcacctcgagctgaagtgagaatgtttatggaagagaa

SEQ ID NO: 14221 - DNA, 242 bp, Bos taurus
  Clone ID: 61-LIB188-019-Q1-E1-H10
gggatacaagagctacagcccttacgacatgctggagagcatcaagaaggaggtcaaaggagacctggaaaatgcctttctgaatctggttcagtgcattcagaataagcccctgtattttgctgacagactgtatgactccatgaagggcaagggcactcgcgacaaggtcctgattagaatcatggtctcgcgcagtgaagtggacatgttgaaaattagatctgagttcaagaaaaagt

SEQ ID NO: 14222 - DNA, 428 bp, Bos taurus
  Clone ID: 61-LIB188-019-Q1-E1-H2
gcgggatccctggtcatcggtaacctgctcttctcagctctctggaccttcctgtggttcgttggcttctgcttcctcaccaatcactgggcggccaccaagaagaacgatgtgcatgtacaagccgactcagcccgggcggccatcaccttcagcttcatctccatcatctcctggtgcgtgctggccttcctggcctaccagcgctacaaggctggagtggacgaattcatccaaaactacgtggaccccactccggacccgaacacgacctacgcctcctacccagacgtgcctgcggacacctaccatcagccgcccttcacccagaacgccgagagcaccgatggctaccagccgccccctgtgtacatctaaacaacgttttaatcctaaccctaaagtgtgactgccgtttacaaagagct

SEQ ID NO: 14223 - DNA, 248 bp, Bos taurus
  Clone ID: 61-LIB188-020-Q1-E1-H2
caagctttattttagttttttttttttttttttttttttttttttttttttttttggttcttttgcttttaatggtaggtcaggggtgataggcaaggtaaagggtccatcccctcgcaagcgtcaacccacgggaattccttctgcggcagggccggaaacccaggaggccgcgagactcagaaggccctcccagaatttcagggcgctgaagtaggcatcagggccctcaagcaggtttcggaagg

SEQ ID NO: 14224 - DNA, 399 bp, Bos taurus
  Clone ID: 61-LIB188-021-Q1-E1-H10
tggccgcgggatacttgctggacaggtaaagggaaatctcagtcttggcgagttgatttagtgtgtttaccttgtcagggtcattacggtcaacagctccttcgccaagaaaagattccacattatgcacctcctccagcagctccagcagttcattcagtaagtcgtttttttcaggtgcaatcgcatcgtggtgctccagcaagagtgaatgtgtgttgatgatttcttcaattgagatataaatgactggcttgctgactgtcaccacatctgtgtatttagccatattaaacttttcgtctggttcagggacattacatgcatcattgaaatatttcctgaacgcctgatacgtcgctgataaataactgttcagatacgacaggtgctcgtttt

SEQ ID NO: 14225 - DNA, 406 bp, Bos taurus
  Clone ID: 61-LIB188-021-Q1-E1-H2
gcgatggcggcgggatcacagcgccaaatctaccttcgaggggatcctcaaaaacccaagagcagagtctttgaacagcaggtccctctggccgggtggagagccaaagagctggaagctccgagacttgttttttccaaatttctcctgcgccttgctgagaagcttccagatcaagtcttccttgccatccacacttcgggccacgacagcatgagaagggacctgggccaagtggcactccttgaacgcatccactggcgcccgactgttgttcaggcagagaagctcatactggtccctgtcagccttctctggcaagttctcaaacactgtcgtctctttaacaaaagccacgtctccagccccgtcctgcagacacttgaaggcaccagaataaacgaag

SEQ ID NO: 14226 - DNA, 386 bp, Bos taurus
  unsure (113): unsure at all n locations; Clone ID: 61-LIB188-022-Q1-E1-H2
tcttgcaagtgggtctaacccatatgcacgtaaccgtcctccctttggtcagggctataccaaacctggaccatgttatcgataaagaaggtcagttacactgatgaatgtanctgctacctgtttgcctcccaaaagactccaatactactattttaatttgtattgaagttcacgaatttacaaagcacagcatttttttatgataccactattgctgtgaaatgaaagtataatttactggaagaaaaaagaccaaaatggaagtttttttcctcacctgcctagaagtatagcagcttcctacttattttggaacactactcttacatgtgtgcaaagtgaatgagtttctagcttgccttgtccagaggatattaaaatgc

SEQ ID NO: 14227 - DNA, 401 bp, Bos taurus
  unsure (24),(306): unsure at all n locations; Clone ID: 61-LIB188-024-Q1-E1-H10
gcggagacaaagggaaggctgatnaccctcggtgctctcggcgttctgggtgaaaggccgctgctggtaagtttccgcaaggaagcctgggtaagaggcgtaagcccgtgctcggggtccggagtgggggtcacgtagttctggatgaattcgtccactccagccttgtagcgctggtaggccaagaaggtcagcacgcaccaggagaagatggagaagaagctgaaggtgatggccgcccgggctgagtccgcttctacatgcacatcgttcttcttggtggccgcccactgattggtgaggaancagaagccaacgaaacacaagaaggttcagagagctgagaagagcaagtcaccgatgaccaggttcgagcggccgcccgggcaagtttttttttt

SEQ ID NO: 14228 - DNA, 232 bp, Bos taurus
  Clone ID: 61-LIB188-024-Q1-E1-H2
tccaagaagaagatcttcatgggcctcatcccctacgaccagagcggcttcgtcaacgccatccggcaggtcatcaccacccggaaacaggcagtgggacctggtggcgtggcaggccccgtccagatcgtcaacaacaagttcctggcgtggagcggagtcatggagtggcaagagcccaggcctgagccccacagccggtctaagccgtggctgccctcgcacatctatg

SEQ ID NO: 14229 - DNA, 421 bp, Bos taurus
  Clone ID: 61-LIB188-025-Q1-E1-H10
cgccatggacccgttatacatggcacaattcactcgagcccctcaagggagctgtggctaaattcttctctgccagctgtgttccctgcattgatagacaagcataccccaacctgtgtcaactgtgcaagggggagggggagaaccagtgtgtctgctcctcccgggaaccatacttcggttattctggtgccttcaagtgtctgcaggacggggctggagacgtggcttttgttaaagagacgacagtgttgagaacttgccagagaaggctgacagggaccagtatgagcttctctgcctgaacaacagtcgggcgccagtggatgcgttcaaggagtgccacctggcccaggtcccttctcatgctgtcgtggcccgaagtgtggatggcaaggaagacttgatctggaagcttctc

SEQ ID NO: 14230 - DNA, 429 bp, Bos taurus
  unsure (78): unsure at all n locations; Clone ID: 61-LIB188-025-Q1-E1-H2
cgccatgggacacgtaccatgtttatgacactctcctggtcgtcatacgccacccactggttgcccttggtggcatangggacctgctggtcacggaatctgtgggtggtggctccgtggaggaagtcacagatctcataataggcaaggatccctttctccttggtgaactggcctggaattcctggccctgagatgggggctcccacatctgtcttggaagaggccagagtgtagctcctcccaaaagtggggatacccatcaccagcttattggctggagcccccagcctcagcatgtagctcacagcgtagtcagcgttactgaatctgtcagaacttgcatcttcctggcctcgaaacagggggctgtggtgtccgactgtctggcgccaggctccgtgaaagtcataggtcaaaaggctgatg

SEQ ID NO: 14231 - DNA, 298 bp, Bos taurus
  Clone ID: 61-LIB188-026-Q1-E1-H2
cgccatggcagcagcatgaactgagcagtgtcaggatgctgctgaggctgtaggtgcttttcttgctgtcctggtctgtgaaactgttttggaagttgctgctgctctgagtaaccccatccactttccacttgacattgatatctttggggtagaaatcattcaccaagcacacgacagagacagttccggtcttcagctgctcatcagatggtttgaagaggaagacggatggctcagcatcagaccttttgatctctaccttggttccttggccgaaagttcgaggaacatatgt

SEQ ID NO: 14232 - DNA, 337 bp, Bos taurus
  Clone ID: 61-LIB188-027-Q1-E1-H2
gccagtgcacatctcaggcgaatgcagaactgcgtctgggtttaaaaagggaacaatcgttacattttggcttttattccagatgcctaacttagtttaggcgacagttcaagcgtattaagtgaaggtagataaaatgtaatgacaatcgataagtctcttgcagctacacacactgtctaataatgcttacatggaatgaaaccaatgttacttagctggtgttacacacacatagaactgaagaaaagtaattctaaatgcactatggtgacagtaaaaatgcaaatacagcacagaactaagcactgcttgatatcaaggtgatggttctaac

SEQ ID NO: 14233 - DNA, 382 bp, Bos taurus
  Clone ID: 61-LIB188-028-Q1-E1-H2
atgcacgtacgcgcgcgatgagacggcaacactgttcttttcagttgaaatgctttggcagcaaagtaaatctttgcattctttcttagtaaggaaagatgcaatgtgctttttgcttcatctcagaagagcaagattcttgtcttttatcctctccatctaacggtcagtaaatacacggtcattttaaatttcacatggaaaggattaatctgatgcacatggaatcccctgccctggcagctgtgtgtgtgtgtgtgtgtgtgtgtgtgtgtgtctatacatattattcgggtttgtcagcacaagacaaaatgccttaggacttttacttgtcgctcagaggtggagggacaagtaaaatgcgtgacaagtgaacaag

SEQ ID NO: 14234 - DNA, 410 bp, Bos taurus
  Clone ID: 61-LIB2809-001-Q1-E1-H2
ggccgccgggaccactccaccatctgagccagatggcgggcacatggaggctatttcttggctttggcggagttgcggggtggcgtgatcggccggcctccagtgttcacgtcactgacgagcacgtacctcacgctgtccttatcagctggcctgatgatcagggctgcccacatgagcgtctcatggacacccatcatgagacctgcattgtcaagctcacctccatatctgattggccgatagactttcaccatcctctgcttagaaactggatcagtggctccagtcaatattgtgtgtccctggtgtctttgctgcatctgtcctctttccgtgcctgtgactcctctgccccgtggctacctcgttttgcttctttgtaccactacatgccaccgcctgcaggt

SEQ ID NO: 14235 - DNA, 390 bp, Bos taurus
  Clone ID: 61-LIB2809-002-Q1-E1-H10
gggcccgggataccttcaaagataatattcaatggacagctgcggtggatctggtcggtctgcttgccgctcacaaagtcattgggaaagcgatctcacataagggaatcttacttcttggcccaggagaagctgctcatgggattgcaaatctgatacttatagctatggttgaaaatggcctcgcagaaaaagaggcacgacagaaaatttggatggttgacaagtttggtttagtatttaaggggcgggaagcttcaagagaaagtcatcatgaagcatttgctcactcatctccatagagcctacctgatacttttgaagatgcaatagcatatacttaagccatcagctataattgaagttgcaggatctgagcgacttttcact

SEQ ID NO: 14236 - DNA, 439 bp, Bos taurus
  Clone ID: 61-LIB2809-002-Q1-E1-H2
tggacgcgggatacaagcttttttttttttttttttttttttttttgtttttattttttttttttttttgttttttttttttaatgccttaaaatgtaatttaatgaaagtgaggatagacaaaatctcagttaatgcacacatttatttgatatgatggcacttataggagaagtgattcaaaggcttttaaaacattttccatacagaaatttaatgaagactttaattccctttgactcagtggcctttataccagcatgagactactggaatttaggtaacaagctgttaggacaatttcacttaaggatgttacactatcgaaaatacagtatagaactcaagaagaaagagtgccttcaatttgagattggcctaatctaaaacagcagttgaagcctttgggtacaatgggttgacatgatagatgaaaaga

SEQ ID NO: 14237 - DNA, 437 bp, Bos taurus
  Clone ID: 61-LIB2809-003-Q1-E1-H10
ccatggccacggcatacttgtgcattttttcagtctgagaagctgttccagataacccaggtaacgctcagagggcacatcttccttttgaatgtgcttctgctcaacactattgggaacaatttcctcacttgacgaaatgctttcagcttccatttgcttaatatcttccatggcttgatcctcagttgattcactcccaatatccttgctcagttcattgaccttctcctttccaaacacttctggaaaaggtgccacaaaaaacctgagtaaattttcattgaggacttcttgagggagtccttggtgcttgataggatgtttaggcctggcaagagcaacagccacaagacaggtaaggatgagaagtttcatggttgtcaagatcttgaacccaagactgggaagaagcagcaagctttccttcagcctga

SEQ ID NO: 14238 - DNA, 252 bp, Bos taurus
  Clone ID: 61-LIB2809-007-Q1-E1-H10
gaatgggcatatctctctggggatagggcactgctttctggggaacaggcaggactttggactgagaaagggacagcacggactgaggaggaacatgacaattggaagaaaaagcttgtgagggcggtgcatccaagactggagcacaagcacaggaaggtgcacattttcaacatcagtgagagtcaggctctggctttcagtaaagggctcaactggatatttagggaaaggcatttccttgtgcctaag

SEQ ID NO: 14239 - DNA, 338 bp, Bos taurus
  Clone ID: 61-LIB2809-008-Q1-E1-H2
tgctctaccatcagacaaccccttttgaggtgttgcgatgcacggagggatctggagcttgctattggtggagttctcgaggcttaacataacattagagacaacttgcgagacgtcaaagccagattcacagctgcctaagtcgccaactggaatgccttcgaaaaccgtgaggtgtggctgtatgatcaggtaaatctcatcgatcagcttaaagaggagacgcttcagcagcaggtccaatagctctactggttactgggcccgttcaattgtcatattcatcagctggagttgcaccaaaacaaagacctagccaatcaagtctcagcttgcct

SEQ ID NO: 14240 - DNA, 296 bp, Bos taurus
  Clone ID: 61-LIB2809-011-Q1-E1-H10
ataagatgcggaccaatttgactcaacggggtcaaggtcggactgtgaagactatcttctagattttcagacctaccactttacttcatagcacgagcatgtttggagtggcgcatcaataatacacgtcgcaaagtatttcctgaattaggtatactcgccctgttagtttaaattgagtataccgggttgatatggtggtttcacacaaacttacctgatgactatttagaatccattccctactctttctgagtttcagaaatatttttccttccctctgaaaattacttttc

SEQ ID NO: 14241 - DNA, 221 bp, Bos taurus
  Clone ID: 61-LIB2809-011-Q1-E1-H2
caagggtatgagtaagaggagggatgttttgtgggaggctgttatggatgggcccagggaacggatagactagggactgtgtctgggcaaaggggtggattttatcctggagttcatcctctgtttgctgctgttcctcattctgaaacttctcaattttcttattgatgcgtgtaatagattcctcactgcttgaaaggctttccacaatctcaccaggt

SEQ ID NO: 14242 - DNA, 408 bp, Bos taurus
  Clone ID: 61-LIB2809-013-Q1-E1-H10
ataacccaggtaacgctcagagggcacatcttccttttgaatgtgcttctgctcaacactattgggaacaatttcctcacttgacgaaatgctttcagcttccatttgcttaatatcttccatggcttgatcctcagttgattcactcccaatatccttgctcagttcattgaccttctcctttccaaacacttctggaaaaggtgccacaaaaaacctgagtaaattttcattgaggacttcttgagggagtccttggtgcttgataggatgtttaggcctggcaagagcaacagccacaagacaggtaaggatgagaagtttcatggttgtcaagatcttgaacccaagactgggaagaagcagcaagctgttttgtacaagcttttttttttttttttttttttt

SEQ ID NO: 14243 - DNA, 402 bp, Bos taurus
  Clone ID: 61-LIB2809-013-Q1-E1-H2
ggcgggagacagaaagaggtgggagtgggcagtatctggatccagagtcacatccactgcatgcaatgtagcccttttccatttgagctcttccaggagtttctctttagagctgaattcattcctcctctgtctggatctttccttgtatagtctccaggtaaaaaatatggacccaattgtgagaagtcctaggaccaccaagatgacagccacagccaccatccagggagtcagccttgggaagaaggaggctggtatggaaacctctatttctttctcctggccaagaaggaagttccggatgcagcaggacacattcttcatagaggtgtccctgatgatcactgaagctctcacagtaaacaaaccttcttcatcaggattcctggactctgacat

SEQ ID NO: 14244 - DNA, 429 bp, Bos taurus
  Clone ID: 61-LIB2809-014-Q1-E1-H2
cataaaggcctgaatgggcatatctctctggggatagggcactgctttctggggaacaggcaggactttggactgagaaagggacagcacggactgaggaggaaacatgacagttggaggaagaggctggtgaggctggtgcatccaagactggagcagaggcagaggaaggtgcagattttcaacatcagtgagagtcaggctctggctttcagtaaagggctcaactggatatttagggaagggcatttctttgtgcttaggagccatagcctccttcactttggagactcccattacttcaggctgaaggaaatgcggcaccaccacaggggtttgagtaagaggagggatgttttgtgggaggctgttacggatgggcccagggaacggatagactagagactgtgtctgggcaaaggggtggat

SEQ ID NO: 14245 - DNA, 418 bp, Bos taurus
  Clone ID: 61-LIB2809-016-Q1-E1-H10
gccatgtacccgggatacctcacatagggaataacctttgtcttaggttgaatccatggcttcatagctttctgatgctgataaacagtcttgagatactggggcaaggcgaatttctggtaacgctggctgatttttttcagaaaatttaggcgattcttttcttcttcagtcagtttagttttcttagtgaatacttctgttgattccatgtcaacggtcttctttgaattttcctcactggtggagagctgctctctgttcagagtgggagtaatgggaacagcatttctcttaacctgatcccatgggttcaaaacaattggaccttgatacagatactggagatactgggggaacttctgataaaactgattgatttcattcagtgctttctggtagtgcttatcgtccacag

SEQ ID NO: 14246 - DNA, 318 bp, Bos taurus
  Clone ID: 61-LIB2809-017-Q1-E1-H10
cagcacaaaatatggacccttccagataaataataaaatttggtgcaaagacgaccagaaccctcactcaagcaacatctgtaacatctcctgtgacaagttcctggatgatgatcttactgatgacattatgtgtgtcaagaagattctggataaagtaggaattaactactggttggcccataaagcactctgttctgagaagctggatcagtggctctgtgagaagttgtgaacacctgctgtctttgctgcttccgtcctctttctgttcctggaactcctctgccccgtggctacctcgttttgcttctttgt

SEQ ID NO: 14247 - DNA, 305 bp, Bos taurus
  Clone ID: 61-LIB2809-017-Q1-E1-H2
gccagggcgcgggatacatgttcctggctggtctcgggctgctggttgtcgttggccttcatcagctcctggaatctagaaagcgcaagaggcccattcagaaggtagagatgggaacctcgagtcaaaacgacgtcgacatgagctggattcctcaggaaactctgaaccagatcaataaagcttcaccaagaaggttgcccaggaaacgggcacagaagagatcagtgggatctgatgagtaaatgttcctttgtgcaacaattcggtctttacttaacccgccctaatgttttccggcctga

SEQ ID NO: 14248 - DNA, 253 bp, Bos taurus
  Clone ID: 61-LIB2809-020-Q1-E1-H10
ggatatccccatgttcccactactggtgacgcacgacttcacagtatgaaagacggaatccatgcccaacacaactaacctatgatacgagtgactcatgaactggtctacttctggcctcagcttttcacacacttctaccagctggatgcctatccatctggtgcctgctactacgttccactatgcatacaatacactgacgccccatcattctctgacatccctaatcccattggctctgagaactctc

SEQ ID NO: 14249 - DNA, 405 bp, Bos taurus
  unsure (58),(80),(84),(395): unsure at all n locations; Clone ID: 61-LIB2809-021-Q1-E1-H2
atgctcgcaaccgccatggacgcaaaatgcctgaatgggcatatctctctggggatanggcactgctttctggggaacangcangactttggactgagaaagggacagcacggactgaggaggaaacatgacagttggaggaagaggctggtgaggctggtgcatccaagactggagcagaggcagaggaaggtgcagattttcaacatcagtgagagtcaggctctggctttcagtaaagggctcaactggatatttagggaagggcatttctttgtgcttaggagccatagcctccttcactttggagactcccattacttcaggctgaaggaaaggcggcaccaccacaggggtttgagtaagacgacggatgttttgtgggacgctgttanggatgggccc

SEQ ID NO: 14250 - DNA, 375 bp, Bos taurus
  Clone ID: 61-LIB2809-022-Q1-E1-H10
acagcagcaaggactgaatgggcatatctctctggggatagggcactgctttctggggaacaggcaggactttggactgagaaagggacagcacggactgaggaggaaacatgacagttggaggaagaggctggtgaggctggtgcatccaagactggagcagaggcagaggaaggtgcagattttcaacatcagtgagagtcaggctctggctttcagtaaagggctcaactggatatttagggaagggcatttctttgtgcttaggagccatagcctccttcactttggagactcccattacttcaggctgaaggaaaggcggcaccaccacaggggtttgagtaagaggagggatgtcttgtgggaagctgt

SEQ ID NO: 14251 - DNA, 392 bp, Bos taurus
  Clone ID: 61-LIB2809-023-Q1-E1-H2
atactttgaatgtacatcttatctaaattacccaggaatttgtggctaaaatcagtttaccacagataagctatgatgtgtctggttaattagcatttttatcttgaatgtaaattaatgtcataaaactaacaatacatgttttttattttttaaggaaattgttcccaatagtgttgagcagaagcacattcaaaaggaagatgtgccctctgagcgttacctgggttatctggtaaaattttattaaaagttaatcaaagaccaatgtatcagggaatgagcatgaatgttgtattgataaattatctctccttttcaatatctgctaaacttaaagtaagcagtctaacagattctagcagtatactggaaattttcccccccccttt

SEQ ID NO: 14252 - DNA, 367 bp, Bos taurus
  unsure (218),(344): unsure at all n locations; Clone ID: 61-LIB2809-024-Q1-E1-H2
atacaatgaagaaagctgtctggaaaaggaaaaacaatacccttggtccaaacccttaaggcaaaccctgaaaacttccaacttaacatctaggaaggctgctttagtgtttttcaaggccacgggtctgtctggaatggaaagccaatggcctcctatagataccaatgtgtcatctagaaaggatatgctggattcagtttgccacatctcactangccgactttgtaaccttgtttgtcacctgtctacactgcttaagcatttgatattgaatgaataatgtagagttgatgaaaactttaaaattaaacatgttttcagtcacatgttatttctttganactgaggactctgaattttcaac

SEQ ID NO: 14253 - DNA, 129 bp, Bos taurus
  Clone ID: 61-LIB2809-025-Q1-E1-H2
gggcatatccccctggggatagggcactgctttctggggaacaggcaggactttggactgaggaagggacagcacggactgaggaggaaacatgacagttggaggaacaggctggtgacgctggtgcat

SEQ ID NO: 14254 - DNA, 360 bp, Bos taurus
  Clone ID: 61-LIB2809-027-Q1-E1-H10
gggatacacacggagaactctgggaaatggtttgtacatcggacttccttttggggaacaaggaagacattcgcctcagaaacgggaagctctgactgacgacgcatcatttcagttggatgaaaatgctggtgaggctggtgcatccaagactggagcagacgcataggaaggtgcacattttcaacatcagtgagagtcatgctctggctttcagtaaatggctcaactggatatttagggaatggcatttctttgtgcttacgagccatttcctccttcactttggagatccccattacttcaggctgaatgaaaggcggcaccaccacacgggtttgagtaagaagagggatgttt

SEQ ID NO: 14255 - DNA, 359 bp, Bos taurus
  Clone ID: 61-LIB2809-027-Q1-E1-H2
aatgggcatatctctctggggatagggcactgctttctggggaacaggcaggactttggactgagaaagggacagcacggactgaggaggaaacatgacagttggaggaagaggctggtgaggctggtgcatccaagactggagcagaggcagaggaaggtgcagattttcaacatcagtgagagtcaggctctggctttcagtaaagggctcaactggatatttagggaagggcatttctttgtgcttaggagccatagcctccttcactttggagactcccattacttcaagctgaaggaaatgcggcaccaccacacgggtttgagtaagacgacggatgttttgtgggacgctgt

SEQ ID NO: 14256 - DNA, 325 bp, Bos taurus
  Clone ID: 61-LIB2809-029-Q1-E1-H2
tgggttgctacagtgtcctcttccctgctagtatgaactactgctccaagtcttagtgaaataagatggtgagtcacataaatgggttttaaaataagactcttctcaccccaaataaaataaagctaaatatgctttccaaattacaaggaaatctaatcaagatgctgaccacgtaaagaagccagatcacccatttacctccactgactgcctcagagcacagagctggtgtggcacctccaagacaggagatgtaagtggtccccgctctgcgccaatccagcctgcagtgtcgggggacaaaagccatcagcattcctcg

SEQ ID NO: 14257 - DNA, 437 bp, Bos taurus
  Clone ID: 61-LIB2809-030-Q1-E1-H2
gcgccaagggcccgggatccctataaataccttatctttgacaaaggaggcaagaatatgcaatggagaaaagacaatctcttcaacaagtagtgctgggaaaactgatcaaccacttgcaaaagaatgaaagtcaaaaactttataacaccatacacaaaaataaattcaaaatggattaaagatctaaatgtaagaccagaaactattaaactcctagaggaaaacaggcataacgctctctgacataaatcacagcaggatcctctatgatccaccttccaaaataatggaaataaaagcaaaaataaacaaatgggacctaataaaacttaaaagctttttcacaatgaagaaaactatcagatcagatcagttgctcagtcgtgtctgactctttgtgaccccatgaatcccaacacgccaggcctccctgt

SEQ ID NO: 14258 - DNA, 407 bp, Bos taurus
  Clone ID: 61-LIB2809-032-Q1-E1-H10
cgcatgggctctatcgccattagcgcgggatacaccagaaagacctgaatgggcatatctctctggggatagggcactgctttctggggaacaggcaggactttggactgagaaagggacagcacggactgaggaggaaacatgacagttggaggaagaggctggtgaggctggtgcatccaagactggagcagaggcagaggaaggtgcagattttcaacatcagtgagagtcaggctctggctttcagtaaagggctcaactggatatttagggaagggcatttctttgtgcttaggagccatagcctccttcactttggagactcccattacttcaggctgaaggaaaggcggcaccaccacaggggtttgagtaagaggagggatgttttgtgggacgctgtt

SEQ ID NO: 14259 - DNA, 398 bp, Bos taurus
  Clone ID: 61-LIB3057-002-Q1-K1-H10
gacccacgcgtccggcccaacagacccaccatgaagtccttatgagcttgattcttgggttgctgcgctcgctggagatgaccctctgtatcacctagtcaccgaggtacggggtatgaaaggagccccagatgctatcctatcgagggccatagagattgaggaagaaaacaaacgacttctggaaggcatggagatgatatttggccaggtaattcctggagccaaagagactgagccctaccctgtgtggtcaggactcccgtccctgcaaactaaggatgaagatgcacgttattccgctttttataacctgctccactgcctgcgcagggattcaagcaagattgacacttaccttaagctcctgaattgcagaatcatctacaacaacaact

SEQ ID NO: 14260 - DNA, 363 bp, Bos taurus
  Clone ID: 61-LIB3057-003-Q1-K1-H2
tttgccgccaggacacaggtgtcgtgaaaaccaccgttaaacctaagccaaaatgggaaaggagaagacccacatcaacatcgttgtcattgggcacgtagattcagggaagtctaccacgactggccatctgatctacaaatgtggcgggatcgacaagagaacaattgaaaagttcgagaaggaggctgccgagatgggaaagggctccttcaaatatgcctgggtcttggacaaacttaaagctgaacgtgagcgtggtatcaccattgatatctccctgtggaaatttgagaccagcaagtactatgttaccatcattgatgccccaggacacagagacttcatcaaaaacatgattac

SEQ ID NO: 14261 - DNA, 369 bp, Bos taurus
  unsure (363): unsure at all n locations; Clone ID: 61-LIB3057-004-Q1-K1-H2
gcagaattcaccaagcgttggattgttcacccactaatagggaacgtgagctgggttgagaccgtcgtgagacaggttagttttaccctactgatgatgtgttgttgccatggtaatcctgctcagtacgagaggaaccgcaggttcagacatttggtgtatgtgcttggctgaggagccaatggggcgaagctaccatctgtgggattatgactgaacgcctctaagtcagaatcccgcccaggcggaacgatacggcagcgccgcgggagcctcggttggcctcggatagccggtcccccgccgtccccgccggcgggccgtcgcccgcgtcccccggggcgcggcgcggcgcgcccccgncgcgcg

SEQ ID NO: 14262 - DNA, 408 bp, Bos taurus
  unsure (31): unsure at all n locations; Clone ID: 61-LIB3057-006-Q1-K1-H10
ctcttgaaatcatcaccaccatggacagcanaggttcgtcgcagaaagggtcccgcctgctcctgctgctggtggtgtcaaatctactcttgtgccagggtgtggtctccacccccgtctgtcccaatgggcctggcaactgccaggtatcccttcgagacctgtttgaccgggcagtcatggtgtcccactacatccatgacctctcctcggaaatgttcaacgaatctgataaacggtatgcccagggcaaacggttcattaccatggccctgaacagctgccatacctgctcccttactacccctgtagataaagaacaagcccaacagacccaccatgaactgcttatgagcttgactcttgggttgctgcgctcctggaatgaccctctggatcacctagtca

SEQ ID NO: 14263 - DNA, 324 bp, Bos taurus
  Clone ID: 61-LIB3057-006-Q1-K1-H2
ctccagcagcccgagctcgcttctgctccccattctaggacccaccggctggagcacgggtctcctctgaccatccaggaagaaacacctcgaaccagctgcagtatgggcagtggccggagaaaggtcagctggactctgtgcttcctgcttctgctgctccttgaagccacttccaccaagaacctctggaagcgggcattgccctcgaggctggcggagagggcccgtgcggaggaggtaggcggctcccggcagccccgcgcagaccgctgcccaaccgccccgcgctcgctgccccccggtgcctgccaggctgcacgc

SEQ ID NO: 14264 - DNA, 413 bp, Bos taurus
  Clone ID: 61-LIB3057-008-Q1-K1-H2
ctctgttactggagccagctcagctcagctcagcggagcagatataaaccgagaagggcaaactcatcgagagggcgtcttcgggaccatggcgaatggatatacatatgaagattatcaagacactgcaaaatggcttttgtctcataccgaacagcgacctcaagtggcagtgatctgtggttctgggttaggaggtctggttaacaaattgactcaagcccagacctttgactacagtgaaataccaaactttccagaaagtacagtgccaggtcatgctggtcgactggtgtttgggatcttgaatggcagagcctgtgtgatgatgcaaggcaagttccacatgtatgaaggctatccgttttggaaggtgacattcccagtgagggttttccggcttctgggtgtgg

SEQ ID NO: 14265 - DNA, 443 bp, Bos taurus
  Clone ID: 61-LIB3057-009-Q1-K1-H2
gaagccggcggccccgagcggcccggttacgtggtgaacgtggtgttcgtagaccggtcaggccaacggattccggtgagcggcagagtcggggacaatgttctccacctggcccagcgccatgggttggatctggaaggggcctgcgaagcgtccttggcgtgctccacctgccacgtgtatgtgagtgaggaccacctggaccttctgccgcctcctgatgagagggaggacgacatgctggatatggcccctctcctccaagagaactcccggctgggctgccagatcgtgctgacgcctgagctggaaggggccgaattcaccctgcccaagatcaccaggaacttctatgtggatggccacgtcctcaagccccactgacatgggcaaccggacggccccagacactgacggccccagggccaggactggaagaacat

SEQ ID NO: 14266 - DNA, 219 bp, Bos taurus
  Clone ID: 61-LIB3057-011-Q1-K1-H2
gctagttctagatcgcgagcggacgccctttttttttttctttgttttgtttttttttttttttggtttttctttattctgaccctgatcaccttggcgcaagtgggaggcttagggcagataattcgacttttggtggtgataaaagtgatttttatcataaggggaaaatgacatcttatttttatgatgtttgagtagggaaatattggtatggtg

SEQ ID NO: 14267 - DNA, 440 bp, Bos taurus
  Clone ID: 61-LIB3057-012-Q1-K1-H2
gaacacacatgacatggcggagatactgttagatttgtgtgccctaatgcaacatatgactcataaatcattaatacatctaagtgtaggaaacggtcttaaaagatagtgcatccattcgtcacctatttattgaatgcctactctgtgctaggcactgtactaggcgatacaaaaacttattagtaggctccccccttttttttccccttaaggccattgtgttctggctggtttgtgctggctttaccagagccaagagagtttgaaaatgctgagacgagaacagttactggcgataatggacagcgttcattaagaaccctgtaggatggtctttaacaatatatacttcaagaagggctggtcctaggaagtagaaatatatgactgagtaaaaatgcctctacatgtgggttctggttgaaaagaggaaactg

SEQ ID NO: 14268 - DNA, 328 bp, Bos taurus
  Clone ID: 61-LIB3057-013-Q1-K1-H2
ctcgactccacgcgtccgattgtatcgcgagcggccgcccttttttttttttttttttttttttttttttttttttgttgttttttttgggtgggtgggtgttttttttttttttttttttttttttttttttttttggggtgaataattttaatttttcccacatttttttagaacccttttcccattttccttccggggtaaaaaccccttattaaaaaaaatcccattttctttcttgggggttttttttggaaaagaatttaaaaataatttttttttttatagggaaaaatttttcacccccttttttttgggggccgttttt

SEQ ID NO: 14269 - DNA, 395 bp, Bos taurus
  unsure (10),(156): unsure at all n locations; Clone ID: 61-LIB3057-014-Q1-K1-H2
tcgcgggttnttccgccgtggacactaggtgtctgtgaaaaccatccgttaaactctaagccgagaaggggtaaaggagaagtacccgacatcaaccatcgttgtcattagggtcatcgtagattcagggcaagtctatccacgtactggccatcntgatctatataatgtggcggtgatcgacaagtagaacaattgaaaagtgtcgagaaaggatggcttgccgagatgggaaaagggcttccttcaaatatagcctggtgtcttggacaacactttaaagctgaaccgtgagcgctggtatcacccattgatatctccctgtggaaaatttgagaccagcaagtactatgataccatcattgaggccccaggacacagaaactttatcaaaa

SEQ ID NO: 14270 - DNA, 429 bp, Bos taurus
  Clone ID: 61-LIB3057-015-Q1-K1-H10
attttacactcttaagtcttaccagagtcaaaattatcctaatgtacattatagttttggccttttaggagaaaagtaaaacaaaagcctgatatttatttccaaatgcattgaagaaattaaacaatgttgtgccatatgacaaaaaagtctttcctaaatagtccatctgtttagtactgtattgtgaaatatttgagttctgtttccatacttgaaaaaaaaaacaggatttcagagatgcctgaacaatattatttaagtagtatgtgactaagctatcaattttttgttttaagtaggtttaacttgggaactgacagaaggacattgtttttagatttagcattttgttttaaaacctttaaaggaaccttagaaggacttatacctcacatattaatgttgagaagttctgcttaattttaa

SEQ ID NO: 14271 - DNA, 283 bp, Bos taurus
  Clone ID: 61-LIB3057-016-Q1-K1-H2
ctacactgtattgtaataagtatactctgttataatattcaacaaagttaaatccaaagtcaggattacccattaaagttacatcttcacgtatcacagtttttaaagctgaaaagcatcccagttaaactagatgtgatagttaaaccagatgaaagcatgatgatccatctgtgtaatgtggttttagtgttgcttggttgtttaattattttggacttgttttgtttttgtttgaatgttttcgctgaaatcttggcaaattctttaaatcttttcccca

SEQ ID NO: 14272 - DNA, 408 bp, Bos taurus
  Clone ID: 61-LIB3057-017-Q1-K1-H10
ctcgtccggcccaacagactcaccatgaaatccttatgagcttgattcttgggttgcttctctcctgggatggccctctctatcagctagtcacccaagttctgcgtatgaaaggatccccatattctatcctatcgagggccatagagattgaggaagaaaacaaacgacttctgaaaggcatggacatgatatttggccaggttattcctggagccaaagagactgatccctaccctgtgtggtcaggactcccgttcctgcaaactaaggatgaagatgcacgttattccgctttctataacctgctccacttcctgcgcacggattcaagcaagattgacacttaccttaagctcctgaattgcataatcatctacatcatcaactgctaatcccacattcatt

SEQ ID NO: 14273 - DNA, 337 bp, Bos taurus
  Clone ID: 61-LIB3057-018-Q1-K1-H10
cagaatgttaacccatataaaaataaagtgtacccaaatattgtaacgtatattgctgcggttcttaaaattaaataagggtttaaaaccacttaattggtaattgacaacatctcaattgacagattacgtgtgcttggtatacatattttttttcaaagactttctttaggcctgaatcacactgcattggaaactcctgataaggaatctgtatcaagacctacctatggaaagtaaccttctggcgtgcatacctgccttcaatcccgaccttttcggcgatacacctgtgtttcccggcaactgcgacgagcatccgctgactgataacccc

SEQ ID NO: 14274 - DNA, 458 bp, Bos taurus
  Clone ID: 61-LIB3057-018-Q1-K1-H2
gttagtttaaatacttctctaagaagacatggtacatgaagccttctgttttaaatgttaggtacggatggttcttttcttcccaactcatttatcctacttaaaatgtacgacagttcaaaccatgtatgttagcacaaacttgattcagctcccctttaggttatcagcacttcgtacttgtagcaataaaatttattattatttctcaaatagttggttattttcattacgaatagtcactattctaaaagcttaattctttagttttatttcttgatccttatcatttttcttctattcttttattttgtcttatatatttactttatttttttctttaaattttaagttattttttttcattttttatttttatttatatttttttttttaatttttttattttttattattttatttttttttatttttttatttattatttttattttttt

SEQ ID NO: 14275 - DNA, 117 bp, Bos taurus
  Clone ID: 61-LIB3057-019-Q1-K1-H2
gagatggttcttaatgatccattccctggcaaacttctctgagctttatagctttgtggggcatgcttggctctaatgggtttcatcttaaataaaaacagactctgtagcgatgtc

SEQ ID NO: 14276 - DNA, 392 bp, Bos taurus
  Clone ID: 61-LIB3057-021-Q1-K1-H10
tcgcgccccgcgactcgcggacaagattccgtctaagggcccacagcccgagaagcgcgcgcgcattaagggcgctgcgtgcaataaggacaaaggcagcaaggccaataaggcggcggccgtgggtggcaagaaggtgaagaaggcggccaagcccagcgtacccaaagtgcccaagggccgcaagtgagcgcggtgccctggcgcccacttttccaccccgagtgcacgtacgttttgcgcggagcccgaaccgtcgtgcgcgctccgacaacagtgggcccggtccgtgccggcctgtccattctgcaacgtgggagtatttttatttttttttccccgattatggtttgctttaaatttttgaaacggcccttgtcgactcccttatt

SEQ ID NO: 14277 - DNA, 221 bp, Bos taurus
  unsure (31): unsure at all n locations; Clone ID: 61-LIB3057-021-Q1-K1-H2
cgcgagcggccgcccttttttttttttttangtttgtcgcataaagggacatccctacggaggctgcttttatttaagaagcaacccatgtaaactcaagcatgcatacacaaactataaagcacagagcctggcacctggcaattgtccattcaaaacctgtttaaacatgcaaagaatgaatgtaactttatcacttacacctgctgatcaatgttcaa

SEQ ID NO: 14278 - DNA, 408 bp, Bos taurus
  Clone ID: 61-LIB3057-022-Q1-K1-H2
gcggcggcagggctgaggcaacggtgcccaccctccggctctctctctgcttttctgggcctccggtccgctctccgcccgccgccatgacggaacaggccatctccttcgccaaggatttcctggccgggggcatcgccgccgccatctccaagactgccgttgccccgatcgagcgcgtcaagctcctgctgcaggtgcagcacgcaagcaagcagatcgcggccgacaagcagtacaagggcatcgtggactgcatcgtgcgtatccccaaggagcaaggcgtgctgtccttctggcggggcaacctggccaacgtcatccgctatttccccacgcaagcgctcaacttcgctttcaaagacaagtacaagcagatcttcctggggggcctggacaagcgcacgc

SEQ ID NO: 14279 - DNA, 396 bp, Bos taurus
  Clone ID: 61-LIB3057-025-Q1-K1-H2
gctagatcgcgagcggccgccctttttttttttctgttttttcttgtctataaagggtttgacccccctgtacacaactcactccttttaaagaaaaaaaaattgaaatgtaaggctgtgtaagatttgtttttaaactgtacagtgtctttttttgtatagttaacacactaccgaatgtgtctttagatagccctgtcctggtggtattttcaatagccactaaccttgcctggtacagtatgggggttgtaaattggcatggaaatttaaagcaggttcttgttggtgcacagcacaaattagttatatatggggatggtagttttttcatcttcagttgtctctgatgcagcttatacgaataacttgggttctgttaactgaataccactc

SEQ ID NO: 14280 - DNA, 330 bp, Bos taurus
  Clone ID: 61-LIB3058-001-Q1-K1-H2
tcgttgactcgtggggcgatgctgactctaatttgtgaatttagtacagtttacagtgactgggggtaactgttcaagttgatcttttttttagctggatacaggatagtggtctgtgacttcaggaagcttattctatcgcctgcttccatggtctgcttaaaaaattggcttcatgagtatagaccaagtttaccacttctgatgaacagaccaattgagattcattcctcattctgcttcgatagtgtgggagcagaagcctcatggaataagatgaagctaatttcatgccttagcgtgtgttttctcccttgtgcagaatttaac

SEQ ID NO: 14281 - DNA, 273 bp, Bos taurus
  Clone ID: 61-LIB3058-002-Q1-K1-H10
gcctacttcacatcagccactataattattgctattccaaccggggtaaaagtcttcagctgattggcaacacttcatggaggtaatatcaaatggtctcctgctataatgtgagccctaggctttattttcttatttacagtagggggtttaactggaattgtcttagccaactcttccctcgatattgttcttcacgacacatactacgttgtcgcacatttccactatgttttatcaataggagctgtatttgctattatagggggattt

SEQ ID NO: 14282 - DNA, 371 bp, Bos taurus
  Clone ID: 61-LIB3058-008-Q1-K1-H2
caacaacaaaaattttaataaaatctataaattcattagtaacattttatcagtgttaatttcctagttttgatcattatactataactatgcaaaatgttaacactggggaatctaggtgaaaggtatatgggacccctctgtattattattgtactactaatatttttcatagctgtaaaattatttttaaaatagaaattttaaagtacagttgacccttgaacaacctggggtgttaatccatgtataacttagagttggccctctgtatccacagtgccttcacattcacggagtcatacaaccatggactatgcagtactgtggtatttactattgaaaaatatttgcatgtaatgcaaatggat

SEQ ID NO: 14283 - DNA, 375 bp, Bos taurus
  Clone ID: 61-LIB3058-009-Q1-K1-H10
cggtcttcctcttcttcatcgccgtgcgtggccgcacccccgaggccgcgcagatcgcctcgggcaggaacgccgcgcgcctctgctgcgttaccagccgggacgcggggcgcagctggggcggcgcgcgggacctcacggcggaggcggtgggcagcgctgagcaggactgggccacgtttgccgtggggcctggccacggagtgcagttgcgctctggccgcctgctggtgccggcctacacctaccacgtggtccggcgggagtgcttcggccggatctgcaggaacccgccccagtccttcgcgttctacagtgatgaccacggccgcacctggcagcgcgggggcctcgtgcccagcctgcgctcgggcg

SEQ ID NO: 14284 - DNA, 262 bp, Bos taurus
  Clone ID: 61-LIB3058-010-Q1-K1-H2
acgctagttctagatcgcgagcggccgcccttgtttttttttatgtttgtttccttattagtaccgggcacaacacaaatgcatgtgctttaatattcacatgtcaaaattacaccttgcaagatattgtgcaggtgtttatcagttaactaacatacctatagtgaaaatcatttttataaaaaaataatctacatgcgggcataaaaatatcagggctacttacaaaacatgttaagacccaaacttttatccctgctcg

SEQ ID NO: 14285 - DNA, 415 bp, Bos taurus
  Clone ID: 61-LIB3058-011-Q1-K1-H2
tcgaaaaaaaaaaacatgtcttattccttaattttctttaagatccaagcacttgttgttgtgcctggaagcatcccaatgtctgattgttgaattaaggaatgaataatgaaacaatttgtacttcagattgagacagactggaacctgggacctgggatcctttgctatagtgcttatacctcagcacatgtctcctcaagcaacaaaatacaaagaaactataacagtcccaccacttcattgcaaatagaagggggaaaagtggaagcagtgacagatcttttttctcaggctccaaaatcactacagattgtgactgcagccttaaaatttaaaaatgcttgctccttagaaggaaagctatgacaaacctaaatagcatattaaaaagcagagacatcactttgaaaaa

SEQ ID NO: 14286 - DNA, 333 bp, Bos taurus
  Clone ID: 61-LIB3058-012-Q1-K1-H2
tcccttacatcaattgtgaaagtttgtgagttgcgcccccaagtttgggggtaccctgacttgcggcgtttggtgacagaggaagctaactggagctttacccatggagcacactcaacctgccgaggatcttagtctgacccagcagcctttaaccccagaatttggggaccccgtagaccccatggactaggcccctgacggatcagacactgtggtcctcagtctcttaccctgtaccccggagcctgtgaatcctgagtcagatgctggcagctcctcacctcaaggcaactccctgaagcactcaacgacccttaccaaccggcagcg

SEQ ID NO: 14287 - DNA, 400 bp, Bos taurus
  Clone ID: 61-LIB3058-013-Q1-K1-H10
ctcgccaccgccccagggtccccacctgtcaccgcgcagaccccctgcgccagcctccgtcccagccaaggactcctgacatcaaacatggactgctgcaccgagagcgcctgctcgaagccggacgacgacattctagacatccctctggacgatccgggtgccaacgcggccgctgccaaaatccaggcgagtttccggggccacatggcaaggaagaagataaagagcggagagcgtggccggaagggcccgggccccgggggaccaggcggagctgggggcgccaggggaggcgcggtcggcggccccagcggagactaggccaggactgagcattttcgaagtttcccgagacagatggatgccgcgtccccttcgcagtgacaagacttccctg

SEQ ID NO: 14288 - DNA, 329 bp, Bos taurus
  Clone ID: 61-LIB3058-015-Q1-K1-H10
acgtgagggtgcgtgctgggaatctgactaatcctacaaatcctaacaggcctattcctagcaatgcactacacatgcgaggcaacaacagcattctgctctgttacccatatctgccgagacgtgaactacggctgaatcatccgatacatacacgcaaacggagcttcaatgttttttatctgctgatatatgcacgtaggacgaggcttatattacgggtctgacacttttctagaaacatgaaatattggagtaatccttctgctcacagttatagccacagcatttataggatacgtcctaccatgaggacaaatatcattctg

SEQ ID NO: 14289 - DNA, 283 bp, Bos taurus
  Clone ID: 61-LIB3058-016-Q1-K1-H2
gggatcattgatgcgtggtgagaatccccaaggagcaaggctttctctccttctggaggggtgacctggccaacgtgatccgttacttccccacccaagctctcaacttcgccttcaaggacaagtacaagcagatcttcctggggggcgtggaccggcataagcagttctggcgctactttgccggtaacctggcctacggtggggcaactggggccaccttcctgtgctttgtctacaccgtggacttcgctaggaccaggctggctgccgacgtgggcaa

SEQ ID NO: 14290 - DNA, 439 bp, Bos taurus
  Clone ID: 61-LIB3058-017-Q1-K1-H2
ccacgcgtccgtggcaattggctgccatcttgtacttggggcacaatctcatatccggattttcccatggggttcctggaggatgggagatagttctcaggggatttagccttcctcctgatatccacccaataagaattcctattaatgtatgattttttttaattaaaaaaaaaaaccggaggcttactatatgtcaggctctgctaaatattccctatgtgttatttaatatgtgaggtaaatgaggttaatgaggtaaaatttaagagagtaccactcaggttcctgtttctgtgacagacttctcctatctccaaccaggaaatttcatgatcttgcttattcctgtcttggaaaatcctttccaatgtctaaccaagatctggactgctgaggtaccagttctttgacctatggcttgacatggctgatttga

SEQ ID NO: 14291 - DNA, 442 bp, Bos taurus
  Clone ID: 61-LIB3058-018-Q1-K1-H10
acgcgtccgcgaaaaaggagggttgtccccaaaaagcctcccccatcccctcaatcaacagaggaggatcctgagcacagagtccgggtccgggtcaccaagctccgtcacggaggccccaatcaggatctgactgtcctggagatgaaacgggaaaacccacagctgaaacaaatcgaggggctggtgaaagacctgctggagagggagggactcacagccgaagggaaaattgagatcaaaattgtccgaccagggacagaagggactgaagaggatgcacgttggctgactgatgaggacacaaaaaacctcaaggagattttcttcaatatcttggtgcagggagctgaagaggcacagaaagagcggcagcggcagaaagagctggagagcaattaccgccgggtgtggggctccccaggcggggagggcactgggg

SEQ ID NO: 14292 - DNA, 441 bp, Bos taurus
  unsure (436): unsure at all n locations; Clone ID: 61-LIB3058-018-Q1-K1-H2
aatgcccttgacccggtacctgcacagctaattcctactcattcttaacatctcggctctcgtgtcacctttttcaaactatgtcttgggtaacaaggctgagttgagtgcgcctctgaaaaatttcgatgtgtgttccctgcccttgttacaggacattttgaaattgtaaccactgattctcttgtctgactcctataccagactgaaatcttgaggctaacagttatttaatctgggccggttgatacctttccttactactaagtgaccccgtattgctctgcattgagtcttctatctgctttgtatagttggttatttggctcatttcattattgcttcccaatctgtggggcacctggcactatgctgcttcaacttcataacagtttgcttccgaaagctcacagcttgatcatcaaggaaaggctanatata

SEQ ID NO: 14293 - DNA, 452 bp, Bos taurus
  Clone ID: 61-LIB3058-021-Q1-K1-H10
gttgatattttgataatcaatctctgatcttgcatggataccatgtttcttaaaagaatgagtattttgggttatgcactgcttatggttgtaggattggggacttgtttatagaatcatagaaatgattttctataatactttcttttaaataaaaatgtactgggatgtaatatgaagatataatataatatgcagtgcattatccaaaaaaagtagataattggtggaataggatgtagtgatgataatacctttttgtttttaattttcagtattcatgccatagtaaaatattactgtttggaaactttggtatattcttgtggctactctttttaattgaactgagcttgtgttgggcagctctcttttggggtatgcttgtgtactttttaacagaggtgttaaagtctatcctgactccatgtcctgaaaggacataacagttt

SEQ ID NO: 14294 - DNA, 318 bp, Bos taurus
  unsure (276): unsure at all n locations; Clone ID: 61-LIB3058-021-Q1-K1-H2
acggtctcagaatactatgaagactattatctactcatattcatagtaacactcgcatagaactacgggaagccctcgtcactggtagaaaatattgattcactgttaagctacaaaaatgtatacatagcacaacttaatgctctttacataaaaaatattacactacttagacaaaactctgaaaaatgactgttacgagctaccagcattagaagagctaaactaggctttagaaactgactatgctacaacactggactcaaacagcacctncactgctggaaaaaatatttaggtctgtcatgcaacaggaaa

SEQ ID NO: 14295 - DNA, 404 bp, Bos taurus
  Clone ID: 61-LIB3058-023-Q1-K1-H10
gtgacaccccgcacacctcctccatcgcaaggaaaggggcgaggactgtccctcagcagatttagctggggggctgagggccagaagccaggattcggctatggaggcagagcgtctgactacaaatcggctcacaagggactcaaggggcacgacgcccagggcacgctttccaaaatcttcaagctgggaggacgagacagccgttccgggtccccgatggcaagacgctgaagcccagctcccctcccagaaccccgtccccagcttcttaatacaactgcctcgacgctaaccattgtctaaattcccaagtgcagcaggcatccccccaccctgcccacatgcgcgtcctgcaggctcctggccagcggctcaatggagaagacggtgcagctgtcagc

SEQ ID NO: 14296 - DNA, 379 bp, Bos taurus
  unsure (24): unsure at all n locations; Clone ID: 61-LIB3058-023-Q1-K1-H2
ggtcgaccagcgtcgttgactgangtaaaattacactaccatagtggcctaaaagcagccatcaattgaaaagcgttaaagctcacatcagagattaaatagattccaacaacaaatgattaactcctagccccaatactggactaatctattatagaatagaagcaataatgttaatatgagtaacaagaaaaattttctccttgcataagtctaagtcagtgcctgataatactctgaccactaacagtcaataaaaataatccaacattaaccaatttatggattatactgttaaccaaacacaggagtgcatctaaggaaggattaaaggaggtaaaaggaattcggcaaacacaaaccccgcctgtttaccaaa

SEQ ID NO: 14297 - DNA, 367 bp, Bos taurus
  Clone ID: 61-LIB3058-024-Q1-K1-H2
gccctgctgcacctcttccatgccgcagtgcatatgaagtgccctgatgctcacgagcccctgcggatcctgcatatccgtagcatcttccctttccctgagctggagcagtttctacaggacaccatcaagaggtacaatctgcaagtgctggaggctgaaggagacatgaagcaagccctaagtgagctgcacgcacggcacccccagctggagagctgttctgattggcacccgtcgcactgacccctactactgcagcctctgcccctttagcctcacctacccaggctggcctgaattcatgcgcatcaacccactcctggactggacctacatttacatctgtgactttgtgctccaactg

SEQ ID NO: 14298 - DNA, 390 bp, Bos taurus
  Clone ID: 61-LIB3058-026-Q1-K1-H2
tcgcggactcgtggggcttggagcctcagcagcgatgcgtttcttgactgtcgcgttcctgttcctggcactcagtgccttcgccctggccgagccggtgaaattcaaggactgcggttcttgggtcggagttataaaggaagtgaatgtgagcccatgtcccacccagccttgcaaactgcacagaggacagtcttacagtgttaatgtcacgttcaccagtaatactcagtctcaaagtagcaaggctgtggtacatggcattgtgatgggcattccagttccctttcccattcctgagtctgatggttgtaagtctggaatcagatgccccatcgaaaaagattagacctataactacgtggacaaacttcccgtgaagaatgaata

SEQ ID NO: 14299 - DNA, 403 bp, Bos taurus
  Clone ID: 61-LIB3058-029-Q1-K1-H10
tcccggggcgaccacgcgtcgcgagcatttgatgtgattctggatgaaaaccagctggaagatgcctgcgagcaccgggctgagtacctggaggtttactggagggcgacccaccacccagcccccggccctgggcttctgggccctcccagtgccatccccggacttcagaaccagcagctgctaggggagcgtggcgaggagcactcgcccctggagcgggacagcctgatgccctcagatgaggccagcgagagctcccgccaagcctggacgggatcttcacagcgcagctcccgccacctggaggaggactatgcagatgcctatcacgacctgtaccagcctcaccgccaacacacctcggggctgcctagtgcaaacgggcacgacccccaagacc

SEQ ID NO: 14300 - DNA, 257 bp, Bos taurus
  Clone ID: 61-LIB3058-031-Q1-K1-H10
gcgttcgctgacgcgtgggctgacgcgtggagatgcttatcaaaaggtatttgatgatgaatcatagtagatatagactatgaagatgcataataaaatgaacttgaatatgcttatgatatatactaataatattattcatattaaaaggtattataagatttatattttatattatattaagattattgatattaatatgattttttttatttttttttttaattttttttttttatttattatttttttttatt

SEQ ID NO: 14301 - DNA, 397 bp, Bos taurus
  unsure (45): unsure at all n locations; Clone ID: 61-LIB3058-032-Q1-K1-H2
cacgcgtccggcccccggcaatgtcacaataccaaactcttctgntcgtatgatccgtaataattaccgccgtactactactactctcgctccctgtattagcagccggcatcacaatgctattaacagaccggaacctaaatacaaccttcttcgacccggcaggaggaggagaccctattctatatcaacacttattctgattctttggacaccccgaagtctatattttaatcttacctgggtttggaataatctcacatatcgtgacctactactcatgattaaaaagaaccattctgatatattgtaatagttttatctataatgtatttctgatttataggtttctttatttagtgctcatttatttatttatttttttatttttaattat

SEQ ID NO: 14302 - DNA, 320 bp, Bos taurus
  Clone ID: 61-LIB3058-033-Q1-K1-H10
tctattttcgcctgtgcttcttgaggaaggaccgtgggactgaaccgcagctatgactgaagctgacgtcaatccgaaggcctaccctcttgcagatgctcacctcaccaagaaactattggatctcgttcagcagtcatgtaactacaagcagcttctaaaaggagccaatgatgccaccaaaaccctcaacagaggcatctctgagttcattgtgatggccgcagatgctgagcccttggagatcatcctgcacctcccgctgctgtgtgaggacaagaacgtgccctatgtgttcgtgcgctccaagcaggctctgg

SEQ ID NO: 14303 - DNA, 347 bp, Bos taurus
  Clone ID: 61-LIB3058-034-Q1-K1-H10
gacccactcgtccgagatcgcgagcggccgtccttttttttgttattttcaagtccaagaatctttatttcatgaacaaaactacttgtgtaaagagagacgaggctgaatgggcccctttctaagtggccacaatccaaggctggtgagagagggtgggttgggctggggtgagagtgcgtcgcagggagaggagaccccaggtccagccagaggaagcaggaggggaaatggcaccagggctcagaggggagtgggggggcggtgttcaggaaccctttgccctgaaccgttccagccatcacaagccctactgggcggggagggggcaggtaggcactgggccc

SEQ ID NO: 14304 - DNA, 379 bp, Bos taurus
  unsure (368): unsure at all n locations; Clone ID: 61-LIB3058-035-Q1-K1-H2
aaggttcatgtcttttatccaagatacttgcacttgagtttataactgagtttgaacaccaatgagcaaacccttttgaatttagaaaattctccaaatgccaaatttttataaacaaaatactaacaaccaaaaaaaaaaccccaataacaaccatcaaccaaaagagtccatagccagcagaccaaaagctgaaacctctgggctaatttgtaagatatatgttttaaaaagaaattaactccttagtaaggaggaataaaacctcccttatgctttctgtgttggtagaaatgttttctgatgatgctgttttctcctatactgtatgtaacttctgtaatttcaatattgttgatctatgtatntttgatattgt

SEQ ID NO: 14305 - DNA, 420 bp, Bos taurus
  Clone ID: 61-LIB3058-036-Q1-K1-H10
cggagtccctctgtgagtatatcagtttcatccttgtcgctgcggcgacacccgcagtctccgtcgccatgactgaacagatgacccttcgtggcaccctcaagggccacaacggctgggtgacccagatcgctaccactccccagttcccggacatgatattgtccgcctctcgagataagaccatcattatgcggaagctgaccagagatgagaccaactatggtatcccacagagtgctcttcggggtcactcccactttgttagtgatgtggtcatttcctcagatggccaatttgccctctcaggctcctgggatggaacccttcgcctttgggatctcacaacgggcaccaccactcgccgatttgtaggccataccaaagatgtgctgagtgtggccttctcttctgacaacc

SEQ ID NO: 14306 - DNA, 429 bp, Bos taurus
  unsure (381): unsure at all n locations; Clone ID: 61-LIB3058-037-Q1-K1-H10
acgctagatcgtgagtagcatcccatccctttattctttaattattgcttgtcttaaaataacactacagatagaagatatgatatattgctgttatcaatcatttctagataataaactgactaaacttacatcagggagaaattggtatttatgcaaaaaaacattctgttctagtctttgagagtccatctaacatcattattaatcatgtggctgtgaaattcacagtaatatggttcccaatgaacaagtttacccagcctgctttgctttactgcatgaatgaaaatgatggttcaatttcagaagtaatgattaacagttctgtggtcacatgatgtgcatatagatagctatagtgtaacaacttacactatnttgtgcgcaaaacaaaaaaatctgtgtaactgtaaaacattgaatgat

SEQ ID NO: 14307 - DNA, 499 bp, Bos taurus
  unsure (166),(191)...(192),(331): unsure at all n locations; Clone ID: 61-LIB3058-037-Q1-K1-H2
tcccggctacgacccacgcgtcacgcgcatctcaggtgttggagatcccgctgtgaggagtaaagagtccgctgtccgtctacctgtgcacctggtgccgccgccacgggcatagggagcagctgagcgcccaccgccggtggctgcatggagaaatcaaccgttngtggtcccacttgtacatcgtcttnnatccagggacaatggcaccaaagagggcctatcaggagtgcacctgatgagtctcttacctggtgactcggtggaaaggcggatcgtgattggatgactcgagtgcaggtgtgaccctcagcgccattcgacgccagtngggctccccaactggcagccccctcccgcagccggtgctgcggctctccccaacagtagagccctccagcaccgtggtctccttggagtgggtggacgttcagccagctattgggaccaaggtttctgactatattctgcagcacaagaaagtggacgagtacacaga

SEQ ID NO: 14308 - DNA, 409 bp, Bos taurus
  unsure (31): unsure at all n locations; Clone ID: 61-LIB3058-039-Q1-K1-H2
catggaacggagggaccggatgccatgatcncattttctgaaggtgaagctataagccaactggttcactctccactttcactttcatcaagaggcttttgagttcctcttcactttctgccatgagggtggtgtcatctgcatatctgaggttattgatatttctcccggcaatcttgattccagcttgtgtttcttccagcccagagtttctcatcatggactctgcatataagttaaataagcagggtgacaatatactaccttgacggattccttgtcctatttggaaccagtctgttgtctcatgtccagttctaactgttgcttcctgacctgcatacagatttctcaagaggcagatcaggtggtctggtattcccatctctttcagaattgtccacagttt

SEQ ID NO: 14309 - DNA, 410 bp, Bos taurus
  Clone ID: 61-LIB3058-041-Q1-K1-H2
cgggcgcgtgggatcgtagagacgtgcagttcctcttttcttgtaggctctcctagctatcgactttgcgcttccggaaacatggcctacggtgtggctgtctatgatggggtcatcaaagaggtcaacgacatgaaagtgcgtaagtcgtcgacaccagaggaagtgaagaagcgcaagaaggcggtgctcttctgcctgagtgaggacaagaagaacatcatcctggaggagggcaaggagatcctggtgggtgacgtgggccagacggtagacgacccctatgccacctttgtcaagatgctgccagacaaggactgccgctacgccctctacgatgcaacctacgagaccaaggagagcaagaaagaggaccctggtgtcatcttctgggcccctgagtgtgcacc

SEQ ID NO: 14310 - DNA, 401 bp, Bos taurus
  Clone ID: 61-LIB3058-043-Q1-K1-H10
aaattattcctggtggtcatcggaaaggtcgagttgatgctgtgcgataccaaataaacgatggaccacacaaccagattcgaatatccagacaactccctgagtttgtgccactggattattctgtacctgtagaagtccctgttaaaaattgtaagccagacaaactcccattattcaaacggcaatatgaaaatgccatctttattggaacaaagacagcagatccactctgttatggacatacccagtttcatctgctacctgacaaattaaaaagggaacggcttttgaaacaaaactgtgctgatcagatagaagtcatttttagagctaatgctattgcaagccttttcgcttggactggagcacaggctatgtatcaaggattctggagtgaa

SEQ ID NO: 14311 - DNA, 480 bp, Bos taurus
  unsure (465): unsure at all n locations; Clone ID: 61-LIB3058-043-Q1-K1-H2
actcggatcggaaggcccgacccacgcgtccgcagctaggaggaaaacgccgctggagagtcgataggtggggccgactgacagtcgatcgcggttacgcctggctggggatagggtccgggtggcgaagtgaactcctgtgtttctgcgcatcttttccgtaaatgtctcatatggagctggcgttggacccgggtgaccacgacctgctaggctttctgctagaagaaagcggtggtttgggtgcggcgcccgacgaggccttgacgtctccgccggattgggagctgccactttctgagtctctgagcgactgggacgtggaggatttcctgagctgcctgccgagtcccccagcagtgttgaacgttttcagcaactctgacccctgtcttgtccagcatgaccacacctattctctgtcacaagagcatgtctccatagatctcgataatgagagctatngaaaagagagggctc

SEQ ID NO: 14312 - DNA, 316 bp, Bos taurus
  unsure (49),(55): unsure at all n locations; Clone ID: 61-LIB3058-046-Q1-K1-H2
gacccacgcgtccggggagtgagaggcggtggtcgggccgtttctttcngccggnaaatatccatctgccctggtgtgtgaacccctccgcctattgtcagggcccacggggagcagagggcagcgtccgcgcgttcacggaaggaggatgccttctttcacgcccaccgctccgtatagcataaagaatctgccgaggaggcaggagaagaaagcccgaatccatctaccgccgtggagccataagatggcggaagctgtaccgcgccaacggccaactcttgcaggccaagcgctttaacaggagagcgtactg

SEQ ID NO: 14313 - DNA, 430 bp, Bos taurus
  Clone ID: 61-LIB3058-048-Q1-K1-H2
ctagccgggaaccaggagctccttcattttgccaagggcctcggcaactatctgtttaagtttgcaaccgctgctacaaaaaaaataactgaatcagttgctgaaacagcacaaacaataaagaaatcagtagaagaaggaaagatagatgacatcattgataagacatttataggagattttcataaggaacagaaaaaatttgttgaggagcagaatacaaaaaagtcagaagtagcagtgccaccatgggttgatagtaatgatgaagaaacaattcaacaacaaatcttggccctgtcagctgacaagaggaacttccttcgtgaccctccagccggggtgcagtttaactttgactttgatcagatgtatcccgtcgcactggtcatgctccaagaggatgagctcctgaacaggatgagatttg

SEQ ID NO: 14314 - DNA, 338 bp, Bos taurus
  unsure (33): unsure at all n locations; Clone ID: 61-LIB3058-049-Q1-K1-H2
cgaattcccgctcgacgcgtgcgcgcgagcggncgcccttttttttctttttgttaaaacattataaaatattttattacgaaggtgatcttagctctttaacaaacaaatcatcattcttaatcctcctttaaattttaagaacctcaagattaaagttgctaaattgatttctggatcaagaacagtttttttttttgttttttttacttaaagacaagcccacagcgctttgccagcaatcaaagaacagtccttttgctggttaccagggaatgatagaaaaagccaataatgaaaattcaaattttaaaaaccatcctttttaaaaaaaaaca

SEQ ID NO: 14315 - DNA, 161 bp, Bos taurus
  Clone ID: 61-LIB3058-051-Q1-K1-H10
ctatcttgtagtggatgctttttcaggaacatctgatgagcacatctcgattgtgcattaccttcaagccacaggaattgatggcgctataatcgtcacaactgcgcagcagggctctcttattgacgtgaggaaggagataaactgctgcatgaaggtcg

SEQ ID NO: 14316 - DNA, 391 bp, Bos taurus
  Clone ID: 61-LIB3058-052-Q1-K1-H10
gttctagatcgcgagcggccgccctttttttttttttttttttttttttttttttttggtttttttttttttttttttttttttttttttttttttttttttttttttttttttttttttcggcccacattgggccctttattcatggggggcccgggtccgggaaaggggagcccgggatggataggcccccccccccccctaggggattttccgggacatcaggctttcccccccctaggtttaaagggaacccctttctgggcaaaatccctggaaagcccctctaccccccaaacaaaaaggggggggggggccccccaggcaaaggccccctgggacaaaagggtttaaaagcccggccccatgtccagggccaaaaagcgggggg

SEQ ID NO: 14317 - DNA, 432 bp, Bos taurus
  unsure (397): unsure at all n locations; Clone ID: 61-LIB3058-052-Q1-K1-H2
cggacgcgtgggtgcggttgtggctctaactgtgggcggcaaggaggatgtgatctgggaacttctcaatcacgcccaggaacattttggcaaagataaaccagacaatttccagcttttccaatcccctcatgggaaggacctgctgtttaaggactctgctgatgggtttttaaagattccttctaagatggattttgagctgtacttgggatatgaatatgtcactgctcttcagaatctaagagaaagtaaacccccggactcctcaaaggatgagtgcatggtgaagtggtgtgcaattggtcaccaggagaggacaaagtgtgatcggtggagtgggttcagcggcggggcaatagagtgtgaaacagcagagaacactgaagagtgcatngccaagatcatgaaaggagaagctgatgccatgag

SEQ ID NO: 14318 - DNA, 431 bp, Bos taurus
  Clone ID: 61-LIB3058-053-Q1-K1-H2
gacgaaaacaatggaaaaataagaaatgtagaatcggcagcagtaaccctcaccactcttccttctgagctcttgctagacagacttcaccccaaccccatgtaccagaggatgccactccttttgaatcccaagttgctcagtctggagtatcccaggaataacattgaatatgtgagagatattggagagggagcatttggaagggtctttcaagcaagggctccaggcttacttccctatgaacctttcacaatggtggccgtgaagatgctcaaagaagaagcctcagcagatatgcaagcagactttcagagggaggcagccctcatggcagaatttgataatcctaatattgtgaaactcttaggagtgtgtgcggtggggaagcccatgtgcttgctctttgaatacatggcctacggggacct

SEQ ID NO: 14319 - DNA, 403 bp, Bos taurus
  unsure (389): unsure at all n locations; Clone ID: 61-LIB3058-054-Q1-K1-H2
tcggcgtaggactatgacagcaaagttcccgtgcaccctctacgaggcggtgcgggaagtcctgcacgggaatcagcgcaagcgcagaaagtttttggagacggtggagcttcagatcagcctgaagaactatgaccctcagaaggacaaacgcttctcgggcaccgtcaggttggcaccgttccgatcccacccagccctcagtgcccccgcgctgccctgtctcctcccttgtggctccagtggagctcgaggcggccggtcgcgtgcggcactgaagtgcccgggtagttcagaccccctgctccgggcagacgtggctggaccgacccccaccctgggtcttaaaagaagaggggaggcctggggaggcttttggccgagcccgncggctagtttgaga

SEQ ID NO: 14320 - DNA, 377 bp, Bos taurus
  Clone ID: 61-LIB3058-056-Q1-K1-H2
cgataccaccctcaagtgccctgtgatgctggtggtaggagaccaagcaccccatgaagatgcagtggtggaatgtaactcaaaactggaccccacccagacttctttcctcaagatggctgactctggggggcagccccagctgactcagccaggcaagctgaccgaggccttcaagtacttcctgcagggcatgggctatatggcttcatcctgcatgactcgcctgtcccgatctcgcacggtctccctgaccagcgcagcatccattgatggcaaccggtcccgctctcgcaccctgtcccagagcagcgagtctgggactctctcttcagggccctcagagcacaccgtggaggtctcctgttgaatgatcc

SEQ ID NO: 14321 - DNA, 410 bp, Bos taurus
  Clone ID: 61-LIB3058-058-Q1-K1-H2
aattgacaatttttttgatttgtggtcagctcatgaggcactcagtgacatcactgacttgatgaacttgagtttgagctccaggagatggtaaaggacaggaaagcctggcatgctgcaagtccatggggttgcagagagtcggacacaactgagcaactgaacgacaacatgaagcactcacttatcaagcttttttacctttccattttgcttcaaatgcggcacaacagtagaatggttgacgttgagttcttcagcaacttctcatgtagttgtaagagaatcagctttgatgatgctttcaagtggtccttgtcaacttatgatagctggccactataattctcaccttcaaggctcttatctcctttgcaatgcttcttgaaccaccattgaactatattagc

SEQ ID NO: 14322 - DNA, 334 bp, Bos taurus
  Clone ID: 61-LIB34-001-Q1-E1-H10
agcggaagacacaatggccttctggtccaagtatagcgacggggaccagtgcgaggaccggccctcagggagcccgtgcgacctcccatgctgtggacgcggcaagtgcatcgatggcctgggcggcttccgctggcactgcgccgagggcctggaaggccgcttccgccttcaagaaggtcgcctccccaactgctcggcggaaaacggccgctgcgcccaacactgcattgaagaagaaggcccgggccactggaactgcccgcccgggtaacgggtggaagaagaacaacaactctgccttttcaaagggaccttcccctgttggaaggta

SEQ ID NO: 14323 - DNA, 309 bp, Bos taurus
  Clone ID: 61-LIB34-001-Q1-E1-H2
gtccggagtcaagggtcgaccgacccgtccggtgaagttcgtctccgcacgcgtgaccgcgctgggatggattcctcctcgtcttcctccgcggcgggtttgggctcggtagacccgcagctgcagcatttcattgaggtggagactcagaagcagcgcttccagcagctggtgcaccagatgacggaactttgttgggaaaagtgcatggacaagcctgggccaaagttggacagtcgggctgaggcctgttttgtgaactgcgttgagcgcttcattgacacaagccaattcatcttgaatccactg

SEQ ID NO: 14324 - DNA, 372 bp, Bos taurus
  Clone ID: 61-LIB34-002-Q1-E1-H10
cacgcgtcaaacgaaccgtggaggacctgcagtggtccccaaccgaggacacagtgtttgcctcctgctcagctgacgcctccatccgcatctgggacatccgggcatcccccagcaaggcctgcatgctcatcaccgccactgcccacgactgggacgtcaacatcatcacctggagccatcgggagcccttcctgctcaccggcggggactatggagccctcaaggtctgggacttgcggcagttcaagtctggctccccagtggccatcttcaggcagcaagtggcccccgtgtcctccgtcgagtggcacccccaggacagtggggtctttgcatcctcgggtgccgagaagcagattacacattggg

SEQ ID NO: 14325 - DNA, 380 bp, Bos taurus
  unsure (376): unsure at all n locations; Clone ID: 61-LIB34-002-Q1-E1-H2
aggagcagggtgcgcaggtcctgggtgcagcctggcccctgggcactgaggatccaccctgcctgtccccacctgctcacctctgggaaggtgacagtgatgatgctgggggctctacatgcacagggagtctgcatcctctgggtcacctcctgctgtgaggctatacccatcatgggaacttgccttataacctttcaaatgtcatgatggctacttcataatggctagagtgattttaaatgataaatctatttaacaatataaattaatagaacttttcactttaatgcagcatgaacagaaaagttaatatgtgctcagcagatagagtgtttgcaaaacattcactatggagcatcccactcatcctgangatg

SEQ ID NO: 14326 - DNA, 398 bp, Bos taurus
  Clone ID: 61-LIB34-003-Q1-E1-H10
gacagacaagtgtgcctgctccaaccacgaaccatacttcggctactcaggggcctttaaatgtctgatggatggcgctggggatgtggcctttgtcaagcactcaacggtattcgacaacctgcctaacccagaagacaggaaaaactatgagctgctctgcggggacaacacccggaagtctgtagataattaccaagaatgctacttggcaatggttccttcccatgcggttgtggctcgaactgtgggcggcaaggacgatgtgatctgggaacttctcaatcacgcccaggaacattttggcaaagataaaccagacaatttccagcttttccaatcccctcatgggaaggacctgctgtttaaggactctgctgatgggtttttaaagattc

SEQ ID NO: 14327 - DNA, 410 bp, Bos taurus
  unsure (292),(298): unsure at all n locations; Clone ID: 61-LIB34-004-Q1-E1-H2
cgacgcattgttgccaatgggaaggggatcctggctgcagatgagtccgtaggcacgatggggaaccgcctgcaaaggatcaaggtggagaacacggaagagaaccgccggcagttccgcgaactcctcttcactgtggacagctccgtcagccagagcatcgggggtgtgatcctcttccatgagaccctctaccagaaggacggccagggaaaactgttcagagacatcctcaaggaaaaagggatcgtggtgggaatcaagttagatcaaggagttgctccgcttgcangaacanataaagaaaccaccgttcaagggcttgatggcctttctgaacgctgtgctcagtataagaaagatggtgctgactttgggaagtggcctgctgtgctgaagaatgacaacca

SEQ ID NO: 14328 - DNA, 376 bp, Bos taurus
  Clone ID: 61-LIB34-005-Q1-E1-H2
ctacgaatggtttagcaccaggcgccccacgaacgtgcggtgcgtgacgggcgagggggcggccgcctttccggccgcgccccgtgtcccgggacgaatggctctccgcaccggaccccggtcccgacgcgcggcgggggcgcgccgcgccgcgccccgggggacgcgggcgacggcccgccggcggggacggcgggggaccggctatccgaggccaaccgaggctcccgcggcgctgccgtatcgttccgcctgggcgggattctgacttagaggcgttcagtcataatcccacagatggtagcttcgccccattggctcctcagccaagcacatacaccaaatgtctgaacctgcggttcctcccgtactgagc

SEQ ID NO: 14329 - DNA, 382 bp, Bos taurus
  Clone ID: 61-LIB34-006-Q1-E1-H10
acggctctggattcactgcccacaccccgctctcgcaggcagacatgaggacagagagaacttccttcctcctggctctggggctcctggtgtctgggttctgctccaagggccaatggctcccaaagaaagttaccccaagagaacaacacaaaaggacgtctgttgatgggcactcattaacctccaacaacaatgacttcgccttcaacctccaaaaacaattggctttgaaagaccccaataaaaatgtcatcttctcccctctgagcatctccataaccttggacttcctgtccctggggggtcatgaccacactgtgacagagatcctggaaagtctcaaattcaacctcacagaaaaccccgagacaaaaatcca

SEQ ID NO: 14330 - DNA, 401 bp, Bos taurus
  Clone ID: 61-LIB34-007-Q1-E1-H2
cggacgcgtgggtctaagatggattttgagctgtacttgggatatgaatatgtcactgctcttcagaatctaagagaaagtaaacccccggactcctcaaaggatgagtgcatggtgaagtggtgtgcaattggtcaccaggagaggacaaagtgtgatcggtggagtgggttcagcggcggggcaatagagtgtgaaacagcagagaacactgaagagtgcatcgccaagatcatgaaaggagaagctgatgccatgagcttggacggaggctacctctacatagcaggcaaatgtggcctggtgcctgtcctggcagagaactacaaaactgaaggttaaagttgcaagaacacaccagaaaaaagggtatcttgctggtacctgtggtttaaaacatc

SEQ ID NO: 14331 - DNA, 426 bp, Bos taurus
  Clone ID: 61-LIB34-008-Q1-E1-H2
ggccagagtattacgtttatttgaggagaatgatataaacctgacccacattgaatcaagaccttcacgtttaaggaaagacgagtatgaatttttcaccaatctggatcaacgcagcgtgcctgccctggcaaacatcatcaagatcttgagacatgacattggtgccactgtgcacgagctttcccgggataagaagaaagacacagtgccctggtttccaagaaccattcaggaactcgacaactttgccaaccaggttctcagctatggagctgaactggatgcagatcacccgggatttaaagatcctgtataccgagcaagacggaagcaattcgctgacattgcctacaactatagacatgggcagcccattcctcgagtggaatacacggaggaagaaaaaaatacatggggggacgt

SEQ ID NO: 14332 - DNA, 402 bp, Bos taurus
  Clone ID: 61-LIB34-009-Q1-E1-H10
gacagaagtcatatgtttgaatggaatttggacagaaccacctcagtgtaaagactctcaaggaaaatgtgggcctcctccaccaatagacaatggagacattacctcactcctgcaatcagtatatcctccaggatcgattgttgagtaccggtgtcaggcctactatgaacttcggggaaacagaaatgtagtatgtcagaatggagagtggtcacaactaccaaaatgcttagaggcatgtctaatttcagaagaaacaatgagaaaacatcacatacagttaagatggaaacacgataaaaaaatttactctaaaacagaagatactattgaatttatgtgtcaatatggttatcgtcaactgacaccaaaacatacatttcgagcaacttgtcggga

SEQ ID NO: 14333 - DNA, 390 bp, Bos taurus
  unsure (305),(313): unsure at all n locations; Clone ID: 61-LIB34-010-Q1-E2-H2
aattatcagctaatgttttattaaatcaatgtcttctgggtttcagacagaaaaacattaggctttagagaagacttcagaagtaacatatgaggataataactcatgaatttggatactgttgtcgtggatagtctgagttcttcagctgttaacagggcaagaagaggatagagagctagaccatgccagtgtgctggcagtgggcttgatgatttgagccactgactgtaatatagacacagtcaagttaagatccacacatgcactattaacaaggacgtgcttcaccttatcttgagtanggagaganggctaagtatagtaaaatctttaaaaaaagagagagagagctaatttaaacacagagcagttaacaaagccatactg

SEQ ID NO: 14334 - DNA, 417 bp, Bos taurus
  Clone ID: 61-LIB34-011-Q1-E1-H10
gcgtccgacacgaggggccgggcgtcctgtccatggccaatgcgggccccaacacaaacggctcccagttcttcatttgcaccataaagacagactggctggatggcaaacatgttgtgtttggccatgtgaaagagggcatggacgtcgtgaagaaaatagaatctttcggctccaagagtgggaagacgtccaagaagatcgtcatcacagactgcggccagttgagctgaccctgtgtgcttccaggaggcctctcaggaatgtcagaccccacagggcccaccgggcagcttccccagtgtcctcccttccccagcgccccgttcctggacacccatcgtggacacagtatcaccgctccttgtaagcatcccctgtgaccacccggctcaagttcacctgcgcctcgggcac

SEQ ID NO: 14335 - DNA, 400 bp, Bos taurus
  unsure (390): unsure at all n locations; Clone ID: 61-LIB34-011-Q1-E1-H2
agcatccccagggtcctcggcgcccggcggggtggcggtggtcggcagcgggctcatcgggcggagctgggccatgctgttcgccagcgcgggcttcagggtcaaactgttcgacatcgagcctcggcaggtgaccgacgcgctggttagcctcaggaaggagatgaagatgctggagctgtcggggtacctgaaaggcgagctgggcgcggaggagcagctgtcactcatcagcggctgctctgacctgcgggaggcagtagagggcgccctgcacgtgcaggaatgtgtcccggagaacctggagctgaagcggaagctgttcgctcagctggacaaaatcgccgacgaccacgtcatcttgagcagctccagctcatgcctcctgcnctccaagctg

SEQ ID NO: 14336 - DNA, 444 bp, Bos taurus
  Clone ID: 61-LIB34-012-Q1-E1-H2
gggtccagccacgcgtccgaaaaaatcaggtagggaaataagagcaaaactgggggtggggagtttctttcctggattatggtgtttgtaaaaatttagggaagtatcagttttgtgagaataccagtgactatcctgtccattttcccattgaatttcgttttgagaattttaaaccctcaatacttaggacacggaatttttctgggttctctcttgaatgtttacaagtatgttgatccgatcttaacctgtaacttgggcatgtgatacagttactgtcatgaatttagagtattagtcatgcgtctgtggggaaatatgttccggtaagctgttgtgaaactgaaactgtaaaaacaggtggaaagggttcttgtacgttgctctgtatggtaagaaccagtccttgttgcatcatgtatgtgactactaaacacttct

SEQ ID NO: 14337 - DNA, 316 bp, Bos taurus
  Clone ID: 61-LIB34-013-Q1-E1-H10
gggacgcgtccgaccttgacacttaggtgctaatgtgcaaatgagggaacttggatcttgttgccaatgggttaaaattgggaatctctgttgctactaaatcatagttttaaaaaacaaacctaataatgttgtcattgttgctatctgattccatagcagcagtcactaaattggaaacaaaggttgcaacatgacaaaaaaaattgtgtagtatttaccagcaccgttcagtaatacagccttaaccatacctccttgaactacttcataacttgtcgagaaaagcggtctgctgcaaaggcatgtggtgtgc

SEQ ID NO: 14338 - DNA, 401 bp, Bos taurus
  Clone ID: 61-LIB34-015-Q1-E1-H10
ggtgcctgcctgctaccaaagattgacactatgagagaaaaagtactgacatcatctgccagacagagactcaggtgtgccagtattcaaaaatttggcgaaagagctttaaaagcatggtcagtagctcgcctgagccagaaatttcccaaggctgagtttgtagaagttaccaagctagtgacagatctcacaaaagtccacaaggaatgctgccatggtgacctacttgaatgcgcagatgacagggcagatcttgccaagtacatatgtgataatcaagatacaatctccagtaaactgaaggaatgctgtgacaagcctttgttggaaaaatcccactgcattgctgacgtagaaaaagatgccatacctgaaaacctgcccccattaactgctga

SEQ ID NO: 14339 - DNA, 406 bp, Bos taurus
  Clone ID: 61-LIB34-015-Q1-E1-H2
gtccagggtccacgcacgcgtccgctgcgttgctgctggtgctgggaggatggctgggctctgacgccatcgtgggggcttcagggcggctgcacctggagcgcttcatcccaatggccgtctgcccccgaaacccggaggctgagaggcatctggagcaggagatcgaccgcaccatccggatgatcatgcgggacttcgtgtcgtcctggtaccgcacggtgagccaggagccagccttcgaggaggagatggaggcagccatgcgagggctggtccaggagctccggaggaggatggccagggtggacagccatgctcttgcccacagggttctgactctctgccgttgtcacctgcagagctatattcacgcgacagagggcgcatggaaacagagtggccc

SEQ ID NO: 14340 - DNA, 405 bp, Bos taurus
  Clone ID: 61-LIB34-016-Q1-E1-H2
cacttcacgatactgagaaacaaatcaagaaacaaactgcacttgttgagctgttgaaacacaagcccaaggcaacagaggaacaactgaaaaccgtcatggagaattttgtggcttttgtagacaagtgctgtgcagctgatgacaaagaagcctgctttgctgtggagggtccaaaacttgttgtttcaactcaaacagccttagcctaaacacgacacaaccacaggcatctcagcctaccctgagagtaagaggaaataagagaaatgaaaactcagagcttattcatctgttttccttttctgttggtgttaaaccaacactctcactaaagaacgtaaatttcgttaaatattttgcgtcgtttgattgtgctacaattaataaaaaatgagaagactc

SEQ ID NO: 14341 - DNA, 394 bp, Bos taurus
  Clone ID: 61-LIB34-018-Q1-E1-H10
gccatggtgacctacttgaatgcgcagatgacagggcagatcttgccaagtacatatgtgataatcaagatacaatctccagtaaactgaaggaatgctgtgataagcctttgttggaaaaatcccactgcattgctgaggtagaaaaagatgccatacctgaaaacctgcccccattaactgctgactttgctgaagataaggatgtttgcaaaaactatcaggaagcaaaagatgccttcctgggctcgtttttgtatgaatattcaagaaggcatcctgaatatgctgtctcagtgctattgagacttgccaaggaatatgaagccacactggaggaatgctgtgccaaagatgatccacatgcatgctattccacagtgtttgacaaact

SEQ ID NO: 14342 - DNA, 419 bp, Bos taurus
  Clone ID: 61-LIB34-018-Q1-E1-H2
agctaactgagtttgcaaaaacatgtgttgctgatgagtcccatgccggctgtgaaaagtcacttcacactctctttggagatgaattgtgtaaagttgcatcccttcgtgaaacctatggtgacatggctgactgctgtgagaaacaagagcctgaaagaaatgaatgcttcctgagccacaaagatgatagcccagacctccctaaattgaaaccagaccccaatactttgtgtgatgagtttaaggcagatgaaaagaagttttggggaaaatacctatacgaaattgctagaagacatccctacttttatgcaccagaactcctttactatgctaataaatataatggagtttttcaagaatgctgccaagctgaagataaaggtgcctgcctgctaccaaagattgaaactatg

SEQ ID NO: 14343 - DNA, 410 bp, Bos taurus
  Clone ID: 61-LIB34-019-Q1-E1-H2
aaatgatacctatacgacattgctaaaagacatccctacttttatgcaccagaactcctttaccaagccaataactataatggagcttttcaagaatgctgccaagctgaggataaaggtgcctgcctgcgaccaaagattgatactatgacagaaaaagtacatgacttcatctgccagacaaatactcaagtgtgccagtattcaaaaatttggagaaagagctttacaagcatggacagtagctcgcctgaaccagaacattcccaaggctgaatttgtagaacttaccaaactactgacagatctcacaaaagtccacaatgaaagctgccatggtgacctacatgaatgcgcaaatgacacggcagatcttgccaaatacatctgtggtaatcaagatacaatct

SEQ ID NO: 14344 - DNA, 412 bp, Bos taurus
  Clone ID: 61-LIB34-020-Q1-E1-H10
tcagggtcgacgcgacgcgtccgggaagtatgtccttttgggcaactccaacgcaagtccctaaccttcaagatttatgtcgcatgtcaatccggagagtgatgcccacccaagaactacaggagctgccggttccgtccaaagttttagagtttctctcctaccgtgtttagatgacgctgccttccctaatattagggactgaacacactttacacaaacctcaagctttactgacttcaaggtttaggagatttatttaatttgatacattcttgtattgcagtttgatcaattgagcttttaaaatatgatttatagaccttagaaatatttctgaacatatcatatgtaaattttttttctaaaatttaactgtgaaaacatatacatacatgtatataattatata

SEQ ID NO: 14345 - DNA, 309 bp, Bos taurus
  Clone ID: 61-LIB34-020-Q1-E2-H10
ggaagtgtgtatttttgggcaactccaaggcaagtccctagccttcaagatttatgtcgcatgtcaatccggagagtgatgcccacgcaagaagtacaggagctgccggttccttccaaagttttagagtttctctccgaccgtgtttagaggacgctgccttccctagtagtagggactgaacacacgtttacacgaacctcaagctttactgacttcaaggtttacgagatttatttaatttgatacattcgtgtattgcagtttgatcaattgagcgtttaaaacaggagttatagaccttagaaa

SEQ ID NO: 14346 - DNA, 424 bp, Bos taurus
  Clone ID: 61-LIB34-020-Q1-E2-H2
aaagctttctgtagttgcctccttcagtaggaaataatttgataccatggtatattatttcctcagcattagagaacagtttttctaaatgttggaggaaatctccatagtcattactcaatcagaatttagaatttgcatttaactcacatatgcctgaggaccattctaagttttttatatgtatacataaaagacatatgtaaatggtttggaagttaatttttttgttgtggtttttgttttggtaaatatatttaaatcacagcctttcataaccatggataagcacatgttctggaagtacatcattttgagcaatataagaaataacttcaacttagattaaaaatttaagtcttaacctttcaaattaaataattttgtaattagacacattaaggaatttaaattgggtaatttt

SEQ ID NO: 14347 - DNA, 340 bp, Bos taurus
  unsure (72): unsure at all n locations; Clone ID: 61-LIB34-021-Q1-E1-H10
catgcagaaaacggagacctagttgcagagggagcaaagaagatgttggcattggggataacacgtcccganggccatgagctgagccgtccagaagccgttgagggaaaagccaagccgaagggcaatcacaataccaaccgccttgaactgccctctctacatcgtgcacgtgatgagcaagtctgcggcaaaggtggtggcggatgcccggagagatgggaaggtggtctacggagaacccatcgcagcaagtctcggcacggatggcactcaccactgggatagaaaatggctcaatccgcccaaccagttaatggttcaacccttggaacaaaac

SEQ ID NO: 14348 - DNA, 387 bp, Bos taurus
  Clone ID: 61-LIB34-021-Q1-E1-H2
gccggcatctccagtttgtcccagtggcaccgcccatgagggtgccctcggaggcaccagccacggaggtgccagaccgggaccccgagaagagcagcgaggacgatgtgtacttgcacacggtcatcccggccgtggtggtggcggccatcctgctcatcgcgggcatcattgccatgatctgctaccgcaagaagcggaagggcaagctcaccctggaggaccaagccaccttcatcaagaagggggtgcccatcatctttgcggacgagctggacgactccagcccccgccctcctccagcatgccgctgatcctgcaagaggagaaagcccccctcccccctcccgagttacccaaccagagcatgcccgagaacactcccct

SEQ ID NO: 14349 - DNA, 378 bp, Bos taurus
  Clone ID: 61-LIB34-022-Q1-E1-H2
gggtcgatcacgcgtccggcgcgctcggacccgcggccaggcttgcgcgcagctcccgacaggcggactcccgagcgagatggagtgggtgtgggcgctggtgctactggcggcgctgggcagcgcccgggcggagcgcgactgccgggtgatcagcttccgagtcaaggagaacttcgacaaggctcgcttcgccggcacctggtacgccatggccaagaatgacgccgagggcctgtttctgcaagacagcatcgtcgccgagttctccgtggacgagaatggccacatgagcgccacgggcaagggccgagtccgtctcttaaatagctgagacgtgtgtgcagacatggtgggcaccttcacagacactgagga

SEQ ID NO: 14350 - DNA, 298 bp, Bos taurus
  Clone ID: 61-LIB34-023-Q1-E1-H10
gggtccacgcacgcgtctggagacatacggaccactgagtctccagcagatgacgagacgtgcagtgggaaaccctttgatgccttcactgacctcaagaatggttccctctttgccttccgagggctgtactgctatgagctggatgaaaatgcagtgaggcctggataccccaaactcatccgagatgtctggggcattgacgggcccattgatgctgccttcacccgtgtcaactgtgagggaaagacatacctcttcaacggtagtcagtactggcgcattcacgattgtgtcc

SEQ ID NO: 14351 - DNA, 378 bp, Bos taurus
  Clone ID: 61-LIB34-023-Q1-E1-H2
ttaccacaccttctcaagaagactgctctgtggtgttcactatcatctctgcacatttgaaacctcagactctcccagatgcacctcagcgctgtgtatcaccgcatagctctaagcgatgggaacagcattcctatcatcggacttggtacctactcggaacctaaatcgactcctaaggggacctgtgcaacatcagtgaagattgccattgacacggggtaccggcacattgatggggcctacctctaccagaacgagcatgaagtgggggaggccatcagagagaagatagcagaatgaaaggtgcagatggaggatatcttctacggtggaaagctgtgggctacaaatcctgacccagagtttgtccgccca

SEQ ID NO: 14352 - DNA, 346 bp, Bos taurus
  Clone ID: 61-LIB34-024-Q1-E1-H2
ctcacgggtccacacacgcgtctacagacacttgtgccaaggctgaagctagttaacatcagtgtcttggctcccaactggctcccaattcctggtgaaactcctaaagggagactgttaaatcatgaaattaatcaccatccttttcctttgttccaggctgctaccaagtttaacccaagagtcttctcaagaaatcgactgcaacaaccaggatgtatttaaagctgtggacgctgctctgacaaaatacaacagtgaaaagaggagtggcaaccaatttgtattgtaccgcataaccgaagttgccagaatggataatcctgacgcattttaatccttgaag

SEQ ID NO: 14353 - DNA, 312 bp, Bos taurus
  Clone ID: 61-LIB34-025-Q1-E1-H2
aggcagtcacactcacagtgcccatcgttctgttcccggtacgccgcgccctccagcagattctgtttcccaaccgagagttcagctggctgcggcacgtgctcattggcgttgtcctgctcacgtgtatcaacctgctggtcatctttgcccccaacatcctgggcatcttcggcgtcatcggtgccacgtctgccccgtggctcatcttcaacttcccagctattttccactttcgcatcatacccacctagaaagaaactgcaagggccacccccaaaaatcctgggcccttggtttgccgcaactggg

SEQ ID NO: 14354 - DNA, 398 bp, Bos taurus
  Clone ID: 61-LIB34-026-Q1-E1-H10
agcatttccccgaataaataatataagcttctgactcctccctccctcattcctactactcctcgcatcctctatagttgaagctggggcaggaacaggctgaaccgtgtaccctcccttagcaggcaacctagcccatgcaggagcttcagtagatctaaccattttctctttacacttagcaggagtttcctcaattttaggagccatcaacttcattacaacaattatcaacataaagccccccgcaatgtcacaataccaaacccctctgttcgtatgatccgtaataattaccgccgtactactacgactctcgccccctgtattagcagccggcatcacaatgctattaacagaccggaacctaaatacaaccttcttcgacccggcaggag

SEQ ID NO: 14355 - DNA, 208 bp, Bos taurus
  Clone ID: 61-LIB34-027-Q1-E1-H10
ggaattgaggaactctttcctgacctttgtaaaagaatgatacaaactgcacaagtggatgagagggcaaaaggcaatggctccagtcagccaggaactgcaaggcgaggtgtacagattattgatgatgaacctcaagcccaaagcgttggccgagggtgctgttctcctcgggaaaagtgtacacccctaaaagtgtaaaaaacac

SEQ ID NO: 14356 - DNA, 358 bp, Bos taurus
  Clone ID: 61-LIB34-028-Q1-E1-H2
ctgatgtcatgggtctctgtcctcatcatcctcccagaagcctttgctcagacagacctcagagggaaggtatttgtgtttcctagagaatcttccactgaccatgtgaccctgatgagaaagctggagaaacctctgaagaacttgaccttgtgtctccgagcctatagtgatctctcccggggctacagcctcttctcctacaacatccacagcaaggataacgagctactgggttttaaaaacgggattggagagtacagtctatacattgggaaaaccaaagttactgttagagctaccgagaagttccccagcccagtgcacatctgtagcagctgggagtcttccacaggca

SEQ ID NO: 14357 - DNA, 385 bp, Bos taurus
  Clone ID: 61-LIB34-029-Q1-E1-H2
caagatgcttgttcagcccaacgagatctgcgtcattcagagaggaatgcggttcagcatcgatgtcttcgaggagactagaggctacatcctggaggtttatggagtccacttcgagttgcctgacctgggaccaattggagccaatggcttggccaatcctcgtgatttcctgatacctgttgcctggtatgaagatcgccaagtgccaggtggttacactgtgattaataaataccagggcaagctatttgctgccaaacaggatgtctccccattcaatgttgtggcttggcatgggaattacacccccctacaagtacaacttggagaactttatgggcatcaaatcagttggcctttgaccacgcagaaccatccaatt

SEQ ID NO: 14358 - DNA, 408 bp, Bos taurus
  Clone ID: 61-LIB34-030-Q1-E1-H2
atctgcacagagtagaacgggaacaactgttagagcaactttgtgtgagtccttccaagacccattccagtgtctgggagaaatcgcaccattacctgtgtcacctcatcaccttcctgtttcctcgtaatgcctcagacagccccactgttcttctgaagactttctggtccaggaaaccaagctgtgtgtgtctgtcccataaaatgccatgtggctgtacctgctggtcctcgtgggcctgtactacctcctacgctggtaccgggagaggcatgtggtgagccagctccgggacaagttcgtcttcatcacaggctgtgactcaggcttcgggaacctgctggccaggcagctggacctgagaggcttgagggtcctggctgcatgtccgacagacatgggggg

SEQ ID NO: 14359 - DNA, 355 bp, Bos taurus
  Clone ID: 61-LIB34-031-Q1-E1-H2
ccacgcgtccgacaccacaacgacattggcacaatgatagtgggtgacttttatttctcgtctccgtctcttcagctctgcttattccaagggtgtgtttcgtcgagatgacacataagagtgtgattgctcatcggtttaaagatttgggagaagaccattttataaggctggtactgattgccttttctcagtatctccagcagtgtccatttgatgagcatgtcaaattagtgcacgaactaacttagtttgcaaaaacatgtgttgcagaagaatcccatgccggcggtgaaaaatcacgtcacactctccttggagatgaattgtgtcaagttgcatcccttcttgaaac

SEQ ID NO: 14360 - DNA, 294 bp, Bos taurus
  Clone ID: 61-LIB34-032-Q1-E1-H2
atctattaaaaactcatagctaacatcatacttaatgatgacatactaaaatgctattcccctgagatccagatagagaccagaatgtctactgtcataaattctgtgtagtattgtactggaggatctacccagaataattaggcaagaaaaagaaataaaatcacaactgataagaaagcagtaaaaaatatctctagtcctggatgacatattttttacaagacagagtgaaaaaatggaatgggcagttaattgcaaatgggttaaggggtggtcctttggggagtgatt

SEQ ID NO: 14361 - DNA, 363 bp, Bos taurus
  Clone ID: 61-LIB34-035-Q1-E1-H2
aaccagctgcagctgaccgtgggcaacaccatgttcgtgcacgacgagctgaaactgctggacatgttcatataacatgcctatgtgctgtactcgtctgaagcgttctcgaccaacttcagggatacttaaactgccaggagtctgataaatgagtatgtgaagaataggacccattggaaaattgattaactgttcaagtacctttccccgagaccatagttcgtgatattgaattacatctacattaaagtccaatggaagatgccctttgaccccatacacactgagcaggcagagttccacgtgagcgacatcaagacggtggaggtgcccacgatgactccttacctggaaacccct

SEQ ID NO: 14362 - DNA, 418 bp, Bos taurus
  Clone ID: 61-LIB34-036-Q1-E1-H2
agactgatgcagagaagctagttcagcaggtttttcatgctttctgtgatatgatgcaactgatggaaatgcctcatctctagagactaaccatttattaagcacttagcaaaatatataattgggtgccaggagtgggtggtattgtgagacaggaacggatgttaactgaaggaaacttgttaaatgtagagatcagtagaatcatgctctcaaaatttatcctgacatagaaagtagaaatatttttaagcttcctctgatgcagcaatacaaattacaatatgactatagaactatgcatagtttaagatcagcctcaacaatgccaatctacagattttaacagtgcaaatctaactctcagatatctttgttggtacctaagtagggtataagtcttctttctggacatcat

SEQ ID NO: 14363 - DNA, 422 bp, Bos taurus
  Clone ID: 61-LIB34-037-Q1-E1-H2
tgcacagtcaccagccatgacctaggacagtgaatcgataatggcactctccatcacgcggggccttctgctgctggcagccctgtgctgcctggcccccatctccctggctggagttctccaaggacacgctgtccaagagacagatgatacatcccaccaggaagcagcatgccacaagattgcccccaacctggccaactttgccttcagcatataccaccatttggctcatcagtccaacaccagcaacatcttcttctcccccgtgagcatcgcttcagcctttgcgatgctctccctgggaaccaagggcaacactcacactggagatcctgaagggcctgggtttcaacctcactgagctcgcagaggctgagattccaaaaagctttcaacatcttctccacacgctcaaacag

SEQ ID NO: 14364 - DNA, 379 bp, Bos taurus
  Clone ID: 61-LIB34-038-Q1-E1-H2
gggtcgagcacgcgtccggtttaaatttgatgaagtccaatttacctatttttgctgttactgctcatgcttttggtgtcagatctaagaatctgttgcaaatccaagatcataaaaattcacttctatgatgtactctaagagtgttatctgtttagcatttatacttgggtctttgatccattttgacttgttttatatatggtgtgaaccatcaccctgacccactctattttcaaagaaatatattacaatgtattttaattgagactttagtatctgtgcccattataatatttaaagcttcttgaaagctggtatcctgatatttgtacaccgttgaattctcagcaggactacaggcatcacacatagtgga

SEQ ID NO: 14365 - DNA, 296 bp, Bos taurus
  Clone ID: 61-LIB34-039-Q1-E1-H10
gtccaggacgcgtccgaatgagacagccctatccacggcagagatgttttccgtgagggacctctgcctggtcctgagtttggtgggtgcaattaagacagaagatggtagtgatcctcccagtggtgacttttgaactgaaggaggaggggtgcgtggcccaagacttgtggaaagacagcaatctgcctgcaaagagacaggctggcccttctgctctgatgaagactggaatacaaaatgcccttctggctgcaggatgaaagggttgattgatgaagtcgatcaagatttta

SEQ ID NO: 14366 - DNA, 326 bp, Bos taurus
  Clone ID: 61-LIB34-039-Q1-E1-H2
agcggtgagaggcaaagctgaggggcacggagaccagctcaagggcttctgggggggacgggctgcgggagaggtggacgaggtgacggtccgacgccgcccggaccaggacaaaagcttgagcagaggagaccagaggcaggggactggacctagaggggtggggagcaggtgcattccgtttggacaggaaggtgggttcacgggagcagctggacctgcaggaaaaaccagatgagagatagcgaaaacccactgttactgccgtttattgagcacctactgggtgcccacaatcgtcctaagatcggttggccaatcgcaag

SEQ ID NO: 14367 - DNA, 392 bp, Bos taurus
  Clone ID: 61-LIB34-040-Q1-E1-H10
cccacgcgtccggatgatttcttgcaacttcgaaaaatttaaaaccatgaaacatctattactgctacttttctgtgcttttatagttcaggcccaatttcctactgactatgacgagggacaagatgacagacctaaggtaggtttgggtgcccgcggtcatcggccctatgacaagaagaaggaagaggcccccagcctgagacctgtgccccctcccatcagcggaggtggctatcgggctcgtcccgccacagcaactgtgggccagaagaaagtggagagaaagccccctgacgctgatggctgcctgcacacggacccggatctgggtgtgttgtgtcctacaggatgtaagttgcaggatactttggtaagacaggagagaccaa

SEQ ID NO: 14368 - DNA, 432 bp, Bos taurus
  Clone ID: 61-LIB34-040-Q1-E1-H2
gagggtacagtaatgcacaatagaatctttgttctctcaacaacctaaagtaggaggtttatttccatagtctgatagtgccaggtaaatgtcaattaaacagaaatatagtatttcaattgatttttgtttcattttccattgcattgtaaattcatgtgtactaagcaaagtgatcatttttttacatttctgctttgaatgcagatgcaatttaatataatagattttttaaaggaattaaagataatacataaatctttagcttttatacaaatatatttaattcagaagtgtgtttatacacatatacacacatgtgttcatatatgtaccacatatatacatgacaaatggttaaataaggtgcagaaatatttatctttgcaagttatgcaggttcatcagtgtgtactcaaacatgtaataaat

SEQ ID NO: 14369 - DNA, 388 bp, Bos taurus
  unsure (344): unsure at all n locations; Clone ID: 61-LIB34-041-Q1-E1-H10
ggctgcctgcacgcggacccggatctgggtgtgttgtgtcctacaggatgtaagttgcaagatactttggtaagacaggagagaccaatccgaaagagtatagaagatttacgtaatactgtggactctgtttcccggacctcttcttccacctttcaatatataactctgctaaaaaacatgtggaaaggaaggcagaatcaagtacaagataatgaaaatgtagtaaacgagtactcctcacatctggaaaagcaccagttatatatagatgagactgtgaagaataatatcccaactaagcttcgtgtgctccgttcaattctggagaatttgagaagcanaatacaaaaattagaatcggatgtctcaactcagatggaatact

SEQ ID NO: 14370 - DNA, 159 bp, Bos taurus
  Clone ID: 61-LIB34-041-Q1-E1-H2
ttactgaaagcagacacattttactttaaattactttatcatatcatttgatgtatgcaagtctgtgctctttgccaaaatcaacatataatgaagacatggctttgttaactgaaatttaaacttgatgcaatgttttaaaataaactcagtactttc

SEQ ID NO: 14371 - DNA, 420 bp, Bos taurus
  Clone ID: 61-LIB34-042-Q1-E1-H2
gcggctagaggacacggccaagatggcggtggttgctgtgttggtgcggaaaccccttgagcaggtctccgggctgctgaggaggcggttccaccggaccgcgccggctgcactgcaggtgacagttcgtgaggctataaatcaaggcatggatgaggagctggaaagagatgagaaggtatttctccttggggaagaagttgcccagtacgatggggcatataaggttagtcgaggcctgtggaagaaatatggagataagaggatcatagatactcccatatctgagatgggctttgctggaattgctgtaggtgccgctatggctgggttacggcccatttgtgaattcatgaccttcaatttctctatgcaagccatcgaccaggtcataaactcagctgccaagaagtactacat

SEQ ID NO: 14372 - DNA, 375 bp, Bos taurus
  Clone ID: 61-LIB34-043-Q1-E1-H10
acgcgtccagtgaattggagacggacagaatttgggatactaactttacttaattttctgtgcccatgaatacctatatcagtattattaaaagggtattgataaacatttccacgttcgtcacccaaatttacgtttctgtttcaactaagcaaaaatcaacaaggtctgtgatgctattttaaactgttccacatcaaactgaaatcttaattatagcttataactcagagcaattcaatggtaatactttttgtatgggacctgtgcctataaaggagacaagtataaattttcttgaaggaaatctccgtttccttattcccagaacttatatcctagaaatccttccttgccatctcccaacccaaccca

SEQ ID NO: 14373 - DNA, 408 bp, Bos taurus
  Clone ID: 61-LIB34-043-Q1-E1-H2
agcattgacctggtgattaacctccccaataacaacactaaatttgtccacgataattatgtgattcggaggacagctgttgacagtggaattgctctcctcactaatttccaggtgaccaaactttttgctgaagctgtgaagaaagctcgcaatgtggactccaagagtctcttccactacaggcagtacagagctgggaaagaactatagagaaatagagacacgctgtctccattcttaaatcaacctaagccactctttatctaaaggaactgatttgcagctttcttttctagagacaaatattgataccaaactttatttcagtatacttaggtgtgccttaatattctttctttcacaattaaattgttgtcagtcaccttttaaaaattttacttagag

SEQ ID NO: 14374 - DNA, 270 bp, Bos taurus
  Clone ID: 61-LIB34-045-Q1-E1-H10
aataaattggtcttaaaccggaacccagttaattactttgctgaggttgaacagttggcttttgacccaagcaacatgccgcccggcatcgagcccagccctgacaaaatgctccagggccgcctttttgcctatcctgacactcagcgccaccgcctgggacccaactatctccacatacctgtgaactgtccctaccgtgctcgagtgggcaactaccagcgtgacggccccatgtgcatgatgggacaatcaaggtggggctccaaa

SEQ ID NO: 14375 - DNA, 416 bp, Bos taurus
  Clone ID: 61-LIB34-046-Q1-E1-H2
atacaaactccagtacactgaaggaatgctgtgataagcctttgttggaaaaatcccactgcattgctgacgtagaaaaagatgccatacctgaaaacctgcccccattaactgctgactttgctgaagataaggatgtttgcaaaaactatcaagaagcaaaagatgccttcctgggctcgtttttgtatgaatattcaacaaggcatcctgaatatgctgtctcaatgctattgagacttgccaaggaatatgaaaccacactggaggaatgctgtgccaaagatgatccacatgcatgctattccacagtgtttgacaaacttaagcatcttgtggatgagcctcagaatttaatcaaacacaactgtgaccaattcgaaaaacttggagagtatggattccaaaatgcgctc

SEQ ID NO: 14376 - DNA, 452 bp, Bos taurus
  Clone ID: 61-LIB34-047-Q1-E1-H10
ggtccacgcacgcgtccgaacatgaatctgttggctaacgatgacctaaccaccacagggtctgacaactgtactttcaacagctgccagaaagctcttgggaaggatgattttactaagattcccaatggagtgaatggtgttgaggaccggatgtcgataatatgggaaaaaggcgtgcacagtggcaaaatggatgaaaaccggtttgtggcagttaccagcacaaatgcagcgaaaatctttaacctctatccaagaaaaggaagaatagctgtgggctcagatgctgacattgtgatttgggacccaaaagccacaaggaccatttcggcaaaaactcatcatcaggctgtcaacttcaacatcttcgagggcatggtttgccatggggtgcccgtggtgactatttcaagaggcaaagtggtatacgaagctggagttttcagtgt

SEQ ID NO: 14377 - DNA, 407 bp, Bos taurus
  Clone ID: 61-LIB34-047-Q1-E1-H2
cattattttccggaatcgttttgagtacaatgatgagagattgctaaccttgataaaatattttaatgaaaattcaaggcttgtaagcaccccctgggtagagctctacaatactttcccctctttactacattatttcccaggaagtcataatacaatatttaaaaacatgactgagcaaagaaagtttattttggaggaaataaagaaacaccaagaatccctggacctcaataaccctcaagattttattgattactttctgattaaaatggaaaaggaaaaacacaataaacattctgaatttaccatggacaacttgatcaccaccgtatgggacgtgtttagtgctggaacagagacaacaagcctcactctgaaatatggactcctggctctgctgaaac

SEQ ID NO: 14378 - DNA, 423 bp, Bos taurus
  Clone ID: 61-LIB34-048-Q1-E1-H2
cagataccccaagggcaccatggccgccctgtgcatcacagtcgccctgccggtgtggatggccaccctgctgttcatctccatctggaagcacatctacagcagctggagactgcgccctggccctttcccactgcccatcatcaggaatcgtttacagctggatattaagaacattcccagatccttcagcaggctggcggagaggtacgggccggtgttcaccctgtacctgggctctcagcgtgccgtggtcgtgcatggctacaagcccgtcaacgaggtcctgcttgactacaagaacgagttttctggcagaggagaagaccctgggtgtcagatgcacaagaacaatgggatcagtttcaacaatggatcaacctgacgggacacccgacggttctcgtatgacaactccgtgac

SEQ ID NO: 14379 - DNA, 445 bp, Bos taurus
  Clone ID: 61-LIB34-049-Q1-E1-H2
gtaccagtcctagagtctcgggtcaagccacccgttgctgcctcagccacagcttctgatatatccaagacgactctcctcgctcagactacctgtcaccatggcccaccagtttccagccctcacttcagaacaggagaaggcactctcagaaactgcccgacgcattgttgccaatgggaaggggatcctggctgcagatgagtccgtaggcacgatggggaaccgcctgcaaaggatcaaggtggagaacacggaagagaaccgccggcagttccgcgaactcctcttcactgtggacagctccgtcagccagagcatccggggtgtgatcctcttccatgagaccctctaccagaagggcggccagtgagcactgttcagagacatcctcaatgaaaaagggatcgtggtgggaatcaagttagatcaaggagttgctccg

SEQ ID NO: 14380 - DNA, 385 bp, Bos taurus
  Clone ID: 61-LIB34-050-Q1-E1-H10
acccacgggcccgcagccctgacataggacagtgaatcgataatggcactctccatcacgcggggccttctgctgctggcagccctgtgctgcctggcccccatctccctggctggagttctccaaggtacacgcgtgtccaagagacagatgatacatcccaccaggaagcagcgtgccacaagattgcccccaacctggccaactttgccttcagcatataccaccatttggctcatcagtccaacaccagcaacatcttcttctcccccgtgagcattgcttcagcctttgctatgctctccctgggagccaagggcaacactcacactgagatcctgaagggcctgggtttcaacctcactgagctcgcagaggctgagat

SEQ ID NO: 14381 - DNA, 403 bp, Bos taurus
  Clone ID: 61-LIB34-050-Q1-E1-H2
atctctttggagttagcaccaactagagaattggccgtacagatctatgaggaagccaggaaattttcataccgatctagagttcgtccttgtgtggtttatggtggtgctgatattggtcagcaaattcgagacttagaacgtggatgccatttattagttgcgactccaggacgtctagtggatatgatggaaagaggaaaaattggattagacttctgcaagtacttggtgttagatgaagccgatcggatgttggatatggggtttgaacctcagatacgtagaatcgttgaacaagatactatgccaccaaagggagttcgccacactatgatgtttagtgctactttccctaaggaaatacagatgcttgctcgtgacttcttggatgaatatatct

SEQ ID NO: 14382 - DNA, 246 bp, Bos taurus
  Clone ID: 61-LIB34-051-Q1-E1-H10
agcggctgggaccctgtacacatatcctgaaaactggagggccttcaaggccctcattgccgctcagtacagcggggctcacgtccgcgtgctctccgcaccaccccacttccattttggccaaaccaaccgcacccccgaatttctccgtaaatttcctgctggcaaggttccagcctttgagggtgacgatggattctgtgtgttcgagagcaatgccattgcctactatgtgagcaacgagga

SEQ ID NO: 14383 - DNA, 234 bp, Bos taurus
  Clone ID: 61-LIB34-051-Q1-E1-H2
gactgctgcccattgcctggacaacattttagcgctgtcattctacaaggtcatcctgggtgcacacaacgagaaagtccgggaacagagtgtccaggaaataccagtgtccaggctgttccgggagccctctcaggcggacattgccttactcaagctgagcagacctgccatcatcacgaaagaggtaatcccagcttgtctgccacccccgaactacatggttgcagcccg

SEQ ID NO: 14384 - DNA, 242 bp, Bos taurus
  Clone ID: 61-LIB34-052-Q1-E1-H2
aaagcaccagttatatatagatgagactgtgaagaataatatcccaactaagcttcgtgtgctccgttcaattctggagaatttgagaagcaaaatacaaaaattagaatcggatgtctcaactcagatggaatactgccgcaccccgtgtactgttacttgcaatattcctgtggtgtctggcaaagaatgtgaggaaatcatcaggaatggaggtgaaacatctgaaatgtacctcattc

SEQ ID NO: 14385 - DNA, 242 bp, Bos taurus
  Clone ID: 61-LIB34-054-Q1-E1-H2
agccaagcctgtgagtgacaccccagacagaggaaccagagccatgcggagtctcagcggactgctgttgttactgactgcctgcctggcggtaaacgccagctccgtgcccacattgcccgatgacattcaagtgcaggagaacttcgacctgtctaggatctatgggaagtggttcaatgtggccgtgggctccacctgcccatggctgaagaggttcaaggagaagatgaccatgagca

SEQ ID NO: 14386 - DNA, 351 bp, Bos taurus
  Clone ID: 61-LIB34-055-Q1-E1-H10
atcagcatgagtactaccgggaaagttatcaggtgcaaagcagccatagtctggaagcctggtggatcattttccattgaggaggtagaagtggctccaccaaaggcaaaagaagttcgcataaagatggtggccacggcgctctgtgggactgagatgaaaatgttgaaggataaaaatcttcagcaccaacactaccctatcattatgggccatgaaggagctggaatagtcgagagtgtgggagaaggagtgagcacagtgaaagcaggagataaagttatcgcactctttctaccacagtgtggtgaatgcacctcttgccttaattctgcagacaatttttgtata

SEQ ID NO: 14387 - DNA, 356 bp, Bos taurus
  Clone ID: 61-LIB34-055-Q1-E1-H2
agtggacctacaactgtgacttgtcagagcaatttggagtggagcccatacatagaatgtaaggaggtatgttgcccagaaccaaacctgaataattatggaagcatcactctacacagaagacctagcactagtactcactgtacctatatcagtggagataagatttcatatgaatgtcatagtaaatatatgtttgatgctttatgtacaaaacatggcacttggagtcctagaacaccagaatgcagaccagattgtaaatcccctcctgtcattgcccatggacaacataaagtagtctctaaattctttacatttgatcaccaagctgtatatgaatgtgataaagggta

SEQ ID NO: 14388 - DNA, 220 bp, Bos taurus
  Clone ID: 61-LIB34-057-Q1-E1-H2
tctccacatccagtcaactgggccttataatagtaactattggcattaaccaaccttacctagctttcctccacatctgtacccacgcctttttcaaagctatactattcatatgctccggttccattattcacagcctaaacgacgaacaagatattcgaaaaataggaggcctatttaaagccatgccattcaccacaacagccctcattgttggcag

SEQ ID NO: 14389 - DNA, 218 bp, Bos taurus
  Clone ID: 61-LIB34-059-Q1-E1-H2
agcgaccgcttcagcctctacaagcagttggctttgaaggaccccaataagaatgtcatcttctcccctctgagcatctccatagccttggacttcctgtccctgggggctcatgaccacactgtgacagagatcctggaaggtctcaagttcaacctcacatagacccccgagacagaaatccaccatgggcttccagcacctcctgcagacgttca

SEQ ID NO: 14390 - DNA, 319 bp, Bos taurus
  Clone ID: 61-LIB34-060-Q1-E1-H10
taaagaaagtaccgcaagggaacgatgaaagaaaaaactaaaagtataaaaaagcaaagattaccccttgtaccttttgcataatgaattaactagtagaagacttaacaaaatgaattttagctaagcagcccgaaaccagacgagctactcacaaacagtttaccaagaactaactcatctatgtggcaaaatagtgagaagatttgtaagtagaggtgacatgcctaacgagcctggtgatagctggttgtccagaaaatgaatctaagttcagctttaaagataccaaaaattcaaataaaccccactgtagctg

SEQ ID NO: 14391 - DNA, 410 bp, Bos taurus
  Clone ID: 61-LIB34-061-Q1-E1-H10
cacgcgtccgcaatggttgtcaaaccagcagagcaaacccctctgactgctcttcacatgggatctttaataaaagaggcagggtttcctcctggagtagtgaatattgtccctggttatgggcctactgcaggggcagccatttcttctcacatggatgtagacaaagtggccttcacaggatcgacagaggttggcaaactgatcaaagaagctgctgggaaaagcaatctgaaaagggtgtccctggaactcgggggaaagagtccttgcattgtgtttgctgatgccgacttggacaatgctgttgaatttgcacaccaaggagtattctatcaccagggccaatgttgtatagctgcatcccgtctctttgtagaagaatcaatttacgatgagtttgttcgaag

SEQ ID NO: 14392 - DNA, 427 bp, Bos taurus
  Clone ID: 61-LIB34-061-Q1-E1-H2
attcccgggccaaccctcaagtaaatcgcctgagtccagaaatttcccaaggctgagtttgtagaagttaccaagctagtgacagatctcacaaaagtccacaaggaatgctgccatggtgacctacttgaatgcgcagatgacagggcagatcttgccaagtacatatgtgataatcaagatacaatctccagtaaactgaaggaatgctgtgataagcctttgttggcaaaatcccactgcattgctgaggtagaaaaagatgccatacctgaaaacctgcccccattaactgctgactttgctgaagataaggatgtttgcaaaaactatcaggaagcaaaagatgccttcctgcgctcgtttttgtatgaataatcaagaaggcatcctgaatatgctgtctcagtgctattgaaacttgcca

SEQ ID NO: 14393 - DNA, 210 bp, Bos taurus
  Clone ID: 61-LIB34-062-Q1-E1-H10
ggaacttacaagaaggggaaagtgaaggagacagccagaaaggaggtattctcgatggtgagtccattcaaggcaacgaggactctcccaccttgctgataactaacctgaccgtcgtgccagccactgtcaccaagcccttcagccagcctgccactgaaccggtccaatcaactatccagcccactgctgagcccttctgcctggcgc

SEQ ID NO: 14394 - DNA, 207 bp, Bos taurus
  unsure (194): unsure at all n locations; Clone ID: 61-LIB34-062-Q1-E1-H2
cgcgtcgacccaagcgtccgaaactttggcacaatgaagtgggtgacttttatttctcttctccttctcttcagctctgcttattccaggggtgtgtttcgtccagatacacacaagagtgagattgctcatcggtttaaagatttgggagaagaacattttaaaggcctggtactggattgccttttctcagntattctccaggca

SEQ ID NO: 14395 - DNA, 357 bp, Bos taurus
  unsure (198): unsure at all n locations; Clone ID: 61-LIB34-063-Q1-E1-H2
acccgcgcggcccgtgtgtggtccggctggtggctgctgctgctgcctttgcttggcctggccggcgccagcggtccccgcaccttggtactgctggacaacctcaacctccgggagacgcattcgcttttcttccggagcctgaaggatcgcggctttgtactcacattcaagaccgcagatgaccccagcctgtcnctcattaagtacggggagtttctttatgacaatctcatcattttctccccttcggtagaagattttggaggaaatatcaacgtggagaccatcagtgcctttatcgacggtggaggcagtgtcctggtggctgccagctcagacatcggcgaccctctc

SEQ ID NO: 14396 - DNA, 433 bp, Bos taurus
  Clone ID: 61-LIB34-064-Q1-E1-H10
atattgtcaccctggttaattaacttatgtgcagagttcattattatagaaatgcaaatcaaaactaccatggggtaccgcctcaatccaatcagaatagccatcattaaaaaatctacaaacagtaaatgctacagaggagcatttatctatttgctattgtggagaaaagggaaccctcctacactgttggtgggaatgtaaattgataaagccactatggagaacattatggaggttcctttaaaaactaggaataaatctaccatgtgacccagcaatcccactactgggaatatagagaaaaccaccgttgacatctaccccaatgttcattaaagcactaatttacaatatccaggacatggaagcacctaaatgtcctttgacagatgagtggatgaagaagatgtgtatgatatacaatggaata

SEQ ID NO: 14397 - DNA, 406 bp, Bos taurus
  Clone ID: 61-LIB34-064-Q1-E1-H2
ctgcaactgtcgtcatctcctgctctgcgggcagcttctcgcggtggaaaccggcagtgaggccacagccgacagctgcccaaatgcccccgagattgctaatagccatgtggagtactcggttcgctatcagtgtgacaaatattacaaactgcatgctggaaatggggtgtaaacatttaacaataacaatgggtaaacaaggacattggacagcaacttcctgaatgtaaagaagatgacaactgccagaaccccccaagatttaaaattgctacctggagtacttggttcgctatcagtgcaaaccctaataaacaatgcgcacctgttgagaattgattgttaaccttatacaatagaagcagtggataaataagaacattggacagaaactccctgaatg

SEQ ID NO: 14398 - DNA, 263 bp, Bos taurus
  Clone ID: 61-LIB34-066-Q1-E1-H2
attagtatatactaatataacaggagcagactttaggaattcaaatgcctaggtatttcattacctctcaatcattcctatttaattattcttttttaatggagataattatatctttttaatgtattttttgttttgatcataggctggagacgtataaaagaccatttcaaaagtgatttacttttttaaagaactttatctgaaaagaaaaagataatatttttcctatgggacaatggacttgcaaagcctcacttcac

SEQ ID NO: 14399 - DNA, 258 bp, Bos taurus
  Clone ID: 61-LIB34-067-Q1-E1-H2
acagcgtccgtgtgtttcttgcatctcctacatttacatgaccgtgggagtgatgaagcccgctgtccgcgctctgttagcctgcgcggatctggggctgtgtctggcggaccctgagagaactgtgagatggtgcaccatttcaactcatgaggccaataagtgtgccagttttcgtgaaaatgtgcttcgtatcttggagagtggtccttttgtctcctgtgtgaagaaaacctcacacatggattgcatcaaggc

SEQ ID NO: 14400 - DNA, 212 bp, Bos taurus
  Clone ID: 61-LIB34-068-Q1-E1-H2
cgagaggttccccttccaagcctcggtggagttcgtcttctcctccagcccagagaagatcaaaggtaacaccccacagaatgagccctccgtctctgtcgactacaacactgcagagcccgcagtgcgctgggactcctacgagaacttcaacttgcaccatgaggacagtgcggatgactctgtcacccacacccgggggcccctggatg

SEQ ID NO: 14401 - DNA, 131 bp, Bos taurus
  Clone ID: 61-LIB34-069-Q1-E1-H2
ataaaaataaaatgacaatttccccttatgttgtttgtggcttttctatcatgatatatgtcgttttatctactatattactaccactcacgccattactatcagtgtgtgaatgatgagattattggtaa

SEQ ID NO: 14402 - DNA, 248 bp, Bos taurus
  unsure (216): unsure at all n locations; Clone ID: 61-LIB34-070-Q1-E1-H10
acgggtttcatcgtatgagcccaccatatattcactgtcggaatagacgtcgacacacgagcctacttcacatcagccactataattattgctattccaaccggggtaaaagtcttcagctgattggcaacacttcatggaggtaatatcaaatggtctcctgctataatgtgagccctaggctttattttccttatttacagtagggggtttaanctggaatttgtcttaaagccaactccttccca

SEQ ID NO: 14403 - DNA, 408 bp, Bos taurus
  Clone ID: 61-LIB34-071-Q1-E1-H2
agaatttttggtgaggccaacttcagggtgttcttgtaaactcttatctgaggaggaactaatgctatttcagatcaaagcagtcttcctccctaagaaactacccaaggaacaatgatagagtcttcttcctcggctgtctgcagttctttcagcagaaaagtgtcaatgaagcatcagcgagttccagttatgatccttcatagcaaggggacaatggcatcctggcccttctctaggctgtggagtatctctgatccaattctgttccaagtgaccttggttgctactctgttggccactgttcttggcagttgtggtattccaccctatttagactttgcttttccaataaatgagttgaatgagacaaggtttgaaactggaactactctgagatacacctgt

SEQ ID NO: 14404 - DNA, 320 bp, Bos taurus
  Clone ID: 61-LIB34-072-Q1-E1-H10
gcgtccagatgaatgcttcctgagccacaaagatgatagcccacacctcactaaattgacaccactccccactactttgtgtgatcactttaatgcacatgagcagaacttttggggaacatacctatacgaaattgctacaagacatccctacttttatgcaccagaactcctttactatgctaacaaatataatggagtttttcaagaatgcagccacactgaacataaaggtgcctgcctgctaccaaagattgatcctatgacataaaaagtactgacatcatctgccagacagagactcaagtgtgccagtattc

SEQ ID NO: 14405 - DNA, 342 bp, Bos taurus
  unsure (203),(252)...(253),(273): unsure at all n locations; Clone ID: 61-LIB34-072-Q1-E1-H2
gaccagccgtccgaactgagacacctatagccagaagagatacgaagaaattgttaaggaagtcagcacctatattaagaaaattggctacaaccccgacacagtagcatttgtgccaatttctggctggaatggtgacaacatgctagaaccaagtgctaatatgccatggttcaagggatggaaagtcacccgtaaggacngcaatgccagtggaaccaccctgcttgaagctctggattgcattctgcnnacaacttcgccaactgacanacctttgcgtttgcctctccaggatgtctataaaattggtggtattggtactgtccctgtgggtcgtgt

SEQ ID NO: 14406 - DNA, 430 bp, Bos taurus
  Clone ID: 61-LIB34-073-Q1-E1-H2
ggcggcggattcggattcactgcccacatcccgctctcgcaggcagacatgagggcagagagaatgtcccccctcctggctctggggctcctggtgtctgggctctgctccagggtccactgcctcccagagaatgtgaccccagaagaacggcacaaagggacgtctgtggatggccactcattagcctcaagcaacactgacttcgccttcagcctctacaagcagttggctttgaagaaccccaataagaatgtcatcttctcccctctgagcatctccatagccttggccttcctgtccctgggggctcgtggccccactgtgacagagatcctggagggtctcaagttcaacctcacagagactcccgagagagaaatccaccaaggtttccagcacctcctgcagatgctcagtcgacccagca

SEQ ID NO: 14407 - DNA, 386 bp, Bos taurus
  Clone ID: 61-LIB34-074-Q1-E1-H2
gcgtccaagatcacgctgtggggaggtgtatggctgccacccctgcccccaaagagtatcctagaaattccgcctggtgagtgtgaccttggcgcctaactggttctccatcagtccccttctcgctcctctctgctgtgtccagggtctcagggacctgaggcgtggcagtggagaagcgcgtggatctgcaggaggaggaggcagctctgggcgccctggcacgccgcacccaccgaggcccctggcttctccgggtctccagggttaggggtgaccagggtggcctgcatgctgccacgttgtggtcacaggtcgtgggggcaccagctggccttgccctgtttggttcgtgctgctcactagctctttgcccagacgcacct

SEQ ID NO: 14408 - DNA, 381 bp, Bos taurus
  unsure (13),(40),(44),(59),(65),(74),(88),(107),(109)...(110),(115),(126): unsure at all n locations; Clone ID: 61-LIB34-076-Q1-E1-H2
ctggccatgggtnccgcggccggtgtcgcggttgtgtggnctgncgtcccgttctcagngcgccngtgcttctngctgccggcgggcncggtccgtgctgtgtttgntnntctgnttcagttggcncatctcaacattgtcaagtttcataagtattgggctgacattaaagagaacaaggccagggtcatttttatcacagaatatatgtcatctgggagtcttaagcaatttctgaagaagaccacgagaaaccacatgactatgaatgaaaagctttggagctttggtcacacaaatcctctctgccctaaccaacttgaattcgtttgaccccccaacaatcaatggaaacctgacctgtgacacaacctccatcaa

SEQ ID NO: 14409 - DNA, 420 bp, Bos taurus
  Clone ID: 61-LIB34-077-Q1-E1-H10
ttacgcactgcattgctgaggtagaaaaagatgccatacctgaaaacctgcccccattaactgctgactttgctgaagataaggatgtttgcaaaagctatcacgaagcaaaaggtgccttcctgggctcgtttttgtatgaatattcatgaacgcatcctgaatatgctgtctcagtgctattgagacttgccaaggaatatcaagccacactggaggaatgctgtgccaaagatgatccacatgcatgctattccacagtgtttgacaaacttaagcatcttgtggatgagcctcagaatttaagtcaaacaaaacctgtgaccaattcgaaaaacttggacagtatgggttccagaatgcgctcataattcgttacagcatggaaagtcacccgaggtggtaactctaactctcgtg

SEQ ID NO: 14410 - DNA, 332 bp, Bos taurus
  Clone ID: 61-LIB34-078-Q1-E1-H2
tgtccctagagaaagtcgaactaagaacggggccacatgctggagaaccacgttgaacgcctgtgggcctacctgaccatccaggagctgctggccaagaggatgaagttggagggccaggagaaggccaacgtgtcagcaaaggccctgcagatgtcattggcctatcagttcgtgaccccactgacctccatgaccgtcaggggcatgacagaccaggacggcctggagcccatcattgataagcccctggacgattatctgcccttggagatggtgggacccagaaagaccttcatgctacaggcctcccagcctgctccaacgcactc

SEQ ID NO: 14411 - DNA, 331 bp, Bos taurus
  Clone ID: 61-LIB34-079-Q1-E1-H2
ctcaaagcctgggatggggaccagtgacctacggacctctgagtccccagcagaggaggagacgtgcactgggaaaccctttgatgccttcactgacctcaagaatggttccctctttgccttccgagggctgtactgctatgagctggatgaaaaagcagtgaggcctggataccccaaactcatccgagatgtctggggcattgaggggcccattgatgctgccttcacccgtgtcaactgtcatggaaagacatacctcttcaagggtactcagtactggcgctttcatgacggtgtcctgaagcctgacttcccccgaaacatctcg

SEQ ID NO: 14412 - DNA, 439 bp, Bos taurus
  Clone ID: 61-LIB34-080-Q1-E1-H10
gacccacgcgtcagtgaaaacggaaaaaggaggatggacagtaattcagaaccgtcaagatggtagtgttgactttggcaggaaatgggatccatataaacaaggatttggaaatattgcaaccaatgcagaagggaagaaatactgtggtgtaccaggtgagtattggctcggaaatgacagaattagccagcttaccaatatgggacccacaaagcttttgattgaaatggaggactggaaaggcgataaggtgacggcactctatgaaggatttactgtacagaatgaggccaacaaatatcaactgtcagtgagcaaatacaaaggaacagctggcaatgccctcatagaaggggcttctcaactggtgggagaaaaccggaccatgaccatccacaacagcatgttcttcagcacatacgacagagacaacgac

SEQ ID NO: 14413 - DNA, 414 bp, Bos taurus
  Clone ID: 61-LIB34-080-Q1-E1-H2
gggccgggcacgcgtcagagagccgcgggatcgccgcgagatccggtctcggtccacgctgcccgtcgcgcagccagtcggccaacccagcgtccgccgctaccgcagccatgggagtgcaggtggagaccatctctcccggagacgggcgcaccttcccgaagcgtggccagacctgcgtggtgcactacacggggatgcttgaagatggaaagaaattcgattcctcccgggacagaaacaagccctttaagtttgtgctgggcaagcaggaggtgatccgaggctgggaagaaggggttgcccagatgagtgtgggtcagagagccaagctgactatctccccagactatgcctatggtgccactggccacccaggcatcatcccaccaaatgccactctcatctttgacg

SEQ ID NO: 14414 - DNA, 439 bp, Bos taurus
  Clone ID: 61-LIB34-081-Q1-E1-H10
gacccacgcgtcagccctgatgctgctagccgggccattgactatgttcagagacagctgcactgttgtggaattcacaactattcagactgggaaaatacagactggtttaaagaaacaaaaaaccagagcgtccctcttagttgttgcagagagacagccagcagctgtaacggcagtctggccaacccctctgatctttatgctgaggggtgtgaggctctggttgtgaagaagctacaagaaatcatgatgcatgttatctgggcagcattggcatttgcagctattcagctgctgggcatgctgtgtgcctgcatcgtgttgtgcagaaggagtagagatcctgcctatgagctcctcatcaccggcggagcctatgcatagtagaaaactcaagcctgagctttttagtcttgttctgatttggaaggtgaat

SEQ ID NO: 14415 - DNA, 412 bp, Bos taurus
  unsure (305): unsure at all n locations; Clone ID: 61-LIB34-082-Q1-E1-H2
tgaacatggatgtgtcaatcaaactgcccagccgcaactctgcggtcaggcatcgtatcctctgggaatctgccagcctcctgcgctcagaagagactaaggaaaatgagcgtttcacagtaaaagctgaagggaaaggacaaggcaccttgtcggtagtgaccgtgtaccatgccaagctcaaaggcaaagtctcctgcaaaaagttcgacctccgggtttccatacgcccagcccccgaaacagtcaagaagcctcaggacgccaaaggttccatgatccttgacatctgtaccaagtacctnggagaccaggatgccactatgttcaacctggataataccatgatgacaagcttctcacctgatgttgaagacctcaaaacgctgaacactggtgtcgacagatacat

SEQ ID NO: 14416 - DNA, 413 bp, Bos taurus
  Clone ID: 61-LIB34-083-Q1-E1-H2
ggtcagccgcgtcgactgcactgggggggatttttgaaggtaaacatcctctgttggttatcacagatccagatgtgatcaaaacagtacaagtgaaagaatgttattctgtcttcacaaaccggaaggtttttggtccaaggggaattatgaaaaatgctgtttctgtggctgaggatgaacaatggaagagaatacggacattgctctctccagccttcaccagtgggaagctcaaggagatgttccctatcattgggaagtatggagatgtgttggtgaggaacctgaagaaggaagcagaaaaaggcaagtccgtcaacatgaaagaggtctttggggcctacagcatggatgtgattactagcacatcatttggagtgaatattgattcccttggcaacccgcaagat

SEQ ID NO: 14417 - DNA, 441 bp, Bos taurus
  unsure (147): unsure at all n locations; Clone ID: 61-LIB34-085-Q1-E1-H2
attccgaggccgacccaggcgtcaagacagaccaaaggtaggtttgggtgcccgcggtcatcggccctatgacaagaagaaggaagaggcccccagcctgagacctgtgccccctcccatcagcggaggtggctatcgggctcgtcncgccacagcaactgtgggccagaagaaagtggagagaaagccccctgacgctgatggctgcctgcacgcggacccggatctgggtgtgttgtgtcctacaggatgtaagttgcaagatactttggtaagacaggagagaccaatccgaaagagtatagaagatttacgtaatactgtggactctgtttcccggacctcttcttccacctttcaatatataactctgctaaaaaacatgtggaaaggaaggcagaatcaagtacaagataatgaaaatgtagtaaacgagtactc

SEQ ID NO: 14418 - DNA, 415 bp, Bos taurus
  Clone ID: 61-LIB34-086-Q1-E1-H10
ggtctagaattacgggccgacccacgcgtcaggcccaaccctggaagggcaggaaggccggagctcaccccacgagggctcacctcgccaggacggagctcaggccgatccctgggaaggcagggtcttccagcaacacctgcccagcatgcggaaagtcggggcccccgggggccagggccaggcccccagcggaatgggcgccctgggccgctcgggggtcgtgctgctcacgtacgtgctggcggccctggagctcacctgcctcttcatgcagttctccatcatgccctacctctctcggaggctgggcctggactcggtcgcctttggctaccagcagactgtgtttggtgtgctgcagctgctgggcgggcctgtgttcggcaggttcgcagaccaacacggggcgccg

SEQ ID NO: 14419 - DNA, 455 bp, Bos taurus
  Clone ID: 61-LIB34-086-Q1-E1-H2
ccgggtagaccacgcgtccgaacatggacctgcacaacctcttccagaccttctgccagaaaggggggctgttgtgcacgctgcagggcaagctgcaaccccaggactggacctcaatagatgggccgctgcagagtgtacaaacgctgctgctcatggttctgcagcaggcctccggccgcccccacggtgcccatggcctcttcctgcgctaccgcgtggaggccttgaccctccgtggcatcaatagcttccgccagtataagtatgatctggtggcagtgggcaaggctctggagggcatgttccgcaagctcaaccatcttctggagcgcctgcaccagtccttcttcttctacctgctccctgcgctctcccgcttcgtctccattggcctctacatgccggccgccggttttttgctcctggtcctcggtctcaaggctctggaactg

SEQ ID NO: 14420 - DNA, 417 bp, Bos taurus
  Clone ID: 62-BOVMS1-002-Q1-E1-H10
atctatgtttactggtatagatacaaacatgagtttgcttgtttatatgttccacactcaacaaggcataatcaaaatgtttctacataatgattttacaaaaaccatcatttacataatttgtataaaaagcttaatacaattttaatcaaaattttaagtaatttaaaaaatgctttaagattctatatttctggagtacctatgaagtggtatgactacatcatgtgaaatatttattttcatctttaactttggagtaccagtttttattttaattaaataaaattccacatttttcaacatattcatggaacatttggtcacattgaagatacagtatctttgtattatttataagcagtcctatgtgatatacttttagaaagcattttttttatatcaatgtaaaccact

SEQ ID NO: 14421 - DNA, 349 bp, Bos taurus
  Clone ID: 62-BOVMS1-004-Q1-E1-H10
atgcgacgtcataactcttctataagtgtcacctaaattcaattcactggccgtcgttttacaacgtcgtgactgggaaaaccctggcgttacccaacttaatcgccttgcagcacatccccctttcgccagctggcgtaatagcgaataggcccgcaccgatcgcccttcccaacagttgcgcagcctgaatggcgaatgggacgcaccctgtatcggcgcattaagcgcggcgggtgtggtggttacgcgcatcgtgatcgctacacttgccagcgccctagcgcccgctcctttcgctttcttcccttcctttctcgccacgttcgccggctttcaccgtcaagct

SEQ ID NO: 14422 - DNA, 424 bp, Bos taurus
  Clone ID: 62-BOVMS1-004-Q1-E1-H6
cgggccgaccacgcgtccgatgaatggggcgtcttcttctctgcagcctcaacaggttacaaacatgcaagaaccacagagctcccacagcatcgatcatcttcagttgctacccagcagacaacggtatcctcgatcgcatcccatccatccactgctggaaaaatcttccgtgccatgtatgactatatggctgctgatgcagatgaggtatccttcaaagatggagatgccattgtcaatgttcaagctattgatgaaggttggatgtacggcactgtgcagaggactggcaggactggcatgctcccacccaactacgttgaagctatttagacacttcagagcatcaatcctgtctacatgacctacaaatcctggtaagtatttcagtttagactctccactagtctccaagttctca

SEQ ID NO: 14423 - DNA, 416 bp, Bos taurus
  Clone ID: 62-BOVMS1-005-Q1-E1-H6
gatgaaccatgccaaccgcatggctgctgaggccctgaagaactacaggaacactcaagccatcctcaaggatacccagatccacctggatgatgctctgcggggccaggaggacttgaaggagcagctggccatggtggagcgcagagccaacctgctgcaggctgagatcgaggagctgagggccaccctggagcagacagagaggagcaggaagatcgcagagcaggagctcctggatgccagtgagcgcgtccagctcctgcacacccagaacaccagcctgatcaacaccaagaagaagctagagacagacatcacgcaaatccagggagagatggaggacattctccaggaagctcgcaacgcagaagagaaagccaagaaggccatcactgatgcagccatgatggctg

SEQ ID NO: 14424 - DNA, 423 bp, Bos taurus
  Clone ID: 62-BOVMS1-006-Q1-E1-H6
cgcgtccgaaataatctatgtagcccctaaggtgggtaagagagtataagtaatgcctaaataaataagctaaaaggtgtcactacagctggatttttgagagaaaatggacatatgaacataggctatgtgtaataaaaataatggcaccttaagattgcactattttatgcattattttatatgccatttcatagcctgcactttaatctccaaagaaatgatgtgtgatgtcccaattgttccttaataataactgtttcccgaaaaaaggcaactaattccaatttaacaataccaagttatttcctggaaggaaaatcctccttttgattccccaattccctaacccaaataatttccaaggattaaggaatccccaacctggcctaatttccacaattataaaatttaaattaaaaa

SEQ ID NO: 14425 - DNA, 436 bp, Bos taurus
  Clone ID: 62-BOVMS1-007-Q1-E1-H6
aggattccaagatgcaacatcaccaatcatagaagaactacttcactttcatgaccacacgctaataattgtcttcttaattagctcattagtactttacattatttcactaatactaacgacaaagctgacccatacaagcacgatagatgcacaagaagtagagacaatctgaaccattctgcccgccatcatcttaattctaattgctcttccttctttacgaattctatacataatagatgaaatcaataacccatctcttacagtaaaaaccataggacatcagtgatactgaagctatgagtatacagattatgaggacttaagcttcgactcctacataattccaacatcagaattaaagccaggggagctacgactattagaagtcgataatcgagttgtactaccaatagaaataacaatccgaatg

SEQ ID NO: 14426 - DNA, 395 bp, Bos taurus
  Clone ID: 62-BOVMS1-008-Q1-E1-H10
gcaagatagatgcacaagaagtagagacaatctgaaccattctgcccgccatcatcttaattctaattgctcttccttctttacgaattctatacataatagatgaaatcaataacccatctcttacagtaaaaaccataggacatcagtgatactgaagctatgagtatacagattatgaggacttaagcttcgactcctacataattccaacatcagaattaaagccaggggagctacgactattagaagtcgataatcgagttgtactaccaatagaaataacaatccgaatgttagtctcctctgaagacgtattacactcatgagctgtgccctctctaggactaaaaacagacgcaatcccaggccgtctaaaccaaacaacccttata

SEQ ID NO: 14427 - DNA, 190 bp, Bos taurus
  Clone ID: 62-BOVMS1-008-Q1-E1-H6
atgcgacgtcatagctcttctacattgtcaccgaaattcaattcactggccgtcgttttacaacgtcgtgactgggaaagaccctgacgttacccaacttaatcgccttgcagcagatccccctttcgccatctggcgtaatagcgatgaggcccgcgccgatagcccttcccaatagttgcgcatcctg

SEQ ID NO: 14428 - DNA, 432 bp, Bos taurus
  Clone ID: 62-BOVMS1-009-Q1-E1-H6
accatattgaaaacacagatgacctgacgactctgatcatcatggacgtacggaaacaagatggtggactgtataccctgagtttagggaatgaatttggatctgactctgctactgtgaatataaatattcgatccatttaagagggcctgtgctctcacactcagactcattcttaacctttcccaaatgattcacatggactaatctttctatctttctgatctgtaaatacttaaaaaaaagagtagttttgtatcaacctaaatgagtcgaagttcaaaaataatacatttcagtcttttcataattgttgacctaagaagattacaaattttctagtgacatgtacatactgtatatagccggattaacggttataaagttttgtaccatttattttatgacattttacactgtaactattgaaac

SEQ ID NO: 14429 - DNA, 461 bp, Bos taurus
  Clone ID: 62-BOVMS1-010-Q1-E1-H10
gggtcgaccacgcgtccggggatacgcgctgccacacgccatcatgcgtctggacctggctggccgcgatctcaccgactacctgatgaagatcctcaccgagcgtggctactccttcgtgaccacagccgagcgcgagatcgtgcgcgacatcaaagagaagctgtgctacgtggccttggactttgagaacgaaatggccaccgccgcctcctcctcctccctggagaagagctacgagttgcccgacggtcaggtcatcaccatcggcaacgagcgcttccgctgcccggagacgctcttccagccctcgttcatcggcatggaatcggcgggaatccatgagaccacctacaacagcatcatgaagtgcgacatcgacatcaggaaggacctgtacgccaacaacgtcatgtctgggggcaccaccatgtacccgggcatcgccgaccgcatgcaga

SEQ ID NO: 14430 - DNA, 421 bp, Bos taurus
  Clone ID: 62-BOVMS1-012-Q1-E1-H10
atcaacaccaagaagaagctagagacagacatcacgcaaatccagggagagatggaggacattctccaggaagctcgcaacgcagaagagaaagccaagaaggccatcactgatgcagccatgatggctgaggagctgaagaaggagcaggacaccagcgcccacctggagcggatgaagaagaacatggagcagacggtgaaggacctgcagaaccgtctggatgaggctgagcagctggccctgaagggcgggaagaagcaaatccagaaactggaggccagggtgcgtgagctggaaggagaggtagagagtgagcagaagcgcaatgtggaagctgtcaagggtctgcgcaaacacgagaggagagtgaaggaactcacttaccagacggaagaagatcgggaaaatattctcagac

SEQ ID NO: 14431 - DNA, 438 bp, Bos taurus
  Clone ID: 62-BOVMS1-012-Q1-E1-H8
taaaaaatgtacaaacagagtgtttatctacaaccccaaaaaaggagattggaaagatctggctccaatgaaaatccctcgttccatgtttggagtggcagtccataaaggcaaaattgtgattgctggaggtgtcactgaagacggtctttcagcttcagttgaagcttttgacctcaacaccaataagtgggaagtaatgactgaatttccccaagaaagaagttccatcagtttggtcagcttggctggatccctgtatgctattggtggttttgccatgattcagctggaatctaaagaatttgcacccactgaagtcaatgacatatggaagtatgaagacgataaaaaagaatgggctgggatgctgaaggaaatacgttatgcttcaagagctagttgcctagcaacacggttaaatctcttcaaactgtc

SEQ ID NO: 14432 - DNA, 479 bp, Bos taurus
  Clone ID: 62-BOVMS1-013-Q1-E1-H6
gtcgaccacgcgtccgatacaatgtcctgggttctttctagtgcagcggaatgtggacaaaggtatgcagttgtgaagtgctttgttgtagcttattaatccacaagggaaacttaggctgtagacataagtacagacccagtgcagttcttgttttctgtatgttgttgggggaataaagttttatatggcaagcacatggcctccctgatttcaatatgcctttattaggatctgtattagccctttatttcgttaaaatcttttttcctcttcctcttgacaagtacgttccaaaatatagtttattgtatcgtccatccttaaaaagtttgttcctttttcattaccgtcagttcacacatagcaaacatattaaacaattggttttactgtgttgtataactttactgtttatcaaactaatttttacatgttttcatcctaaacctcaaatcatggtatttataatttgcctg

SEQ ID NO: 14433 - DNA, 343 bp, Bos taurus
  Clone ID: 62-BOVMS1-014-Q1-E1-H6
atgcgacgtcaaagctcttctatagtgtcacctaaattcacttcactggccgtcggtttacaacatcatgactgggacaaccctgtcgttacccaacttaatcgccttgcagcacatccacctttcgcaaactgacgtattaccgacaaagcccgcaccgatcgaccttcccatcagttgcgcatcctgaatggcgaatgggacgcgccctgtagcggcgcattaagcgctgagggtgtgcaggatacgcgcatcgtgaccgcaacacttgccagctccctagtgcccgctcctttcgcattcatcgcatcctttcacgccacgttcgccagatttccacgtc

SEQ ID NO: 14434 - DNA, 416 bp, Bos taurus
  Clone ID: 62-BOVMS1-017-Q1-E1-H10
attaactgtgagccagctcctgcattgtctaagggaaggaaaccagaaggtggagagacttgaagttgccctcaaggaagccaaagaaagaatttctgattttgaaaagaaagccaaggatcattctgagactgagacccagacagaggagcacacagaacaagagaaagaagaggagaaagacaccaaaactattggaagtgaagtggaaacactgaaccttcaggtgacaaccctgtttaaggagcttcaggaagctcacacgaaactcagtgaagctgagctaatgaagaagagacttcaagaaaaatgtcaggcccttgaaaggaaaaattctgcaagcccatcagaactgaatgaaaaacaagagctggtttataaaaacaaaaagttagagctccaagtggaaagcatgc

SEQ ID NO: 14435 - DNA, 436 bp, Bos taurus
  Clone ID: 62-BOVMS1-017-Q1-E1-H6
ttaacatcttaatactaattattcccatcctattggccgtagcattccttacgttagtggaacgaaaagttctaagctaaatacaactccgaaaagggccaaatgtcctaaggccaaaatggccaacttaaaccaatcgccgatgcattcaaactttacattaaagaaccactacgacccgctacatcttcagcctcaatatttatcctagcacctatcatagctttaggcctagccttaaccatgtgaattcccctaccaataccctatcctcttatcaacataaacctaggagtcctatttatactagccatatcaagcctagccgtatactccattctctgatcaggctgagcttccaactcaaaatacgcactaatcggagccctacgagcagtagcacaaacaatctcatacgaagtaacgctagcaatta

SEQ ID NO: 14436 - DNA, 417 bp, Bos taurus
  unsure (372): unsure at all n locations; Clone ID: 62-BOVMS1-018-Q1-E1-H10
cggaaaaggccccggcgctggtcaacgctgctgtgacttactcgaagcctcgattggccacgttttggtactatgccaaggttgagctggttcctccaacccctgctgagatccctacagcaattcagagcttgaaaaaaattatcaacagtgctaaaaccggtagtttcaaacagctcactgttaaggaagctctactgaatggtttggtggccactgaggtgtggatgtggttttatgttggcgagatcataggcaagcgtggcatcattggctatgatgtttgaagaccaatttttaacatgtgattatatttgctttattattcaagtgttcttggaccacgtgtgagcagactgctatttgaataanataagacaatgtgtcagaatcagtgtttctccatcacacactaca

SEQ ID NO: 14437 - DNA, 320 bp, Bos taurus
  Clone ID: 62-BOVMS1-022-Q1-E1-H10
aaaaaaaaaaaaaaataaaaaaaataaaaaaaaaaaaaaaaaaaaaaaaaaaaaaaaaaaaaaaaagaaaataaaaaaaaaaaaaaaaaaaaaaaaataaaaaaaaaaaaaaaaatattaaaacataaaaaaaaaaaaaaaaaattaaaatggggggggcccccctaaggtttaaaattttttttccctgtcaggggagtttaaatccttttttaaggggcccccaaatttcattccagggggtttttttttaaaattttgtccggggaaaaccccggggtttcccaatttaaccccttttgaaaaaatcccccttttcc

SEQ ID NO: 14438 - DNA, 288 bp, Bos taurus
  Clone ID: 62-BOVMS1-022-Q1-E1-H6
tgaacatcgcactcttgtcagatttgaccaaacagatttcccgagactacggtgtgctgttagaaggtcctggcctcgcactacgcgggctcttcacaattgtgaccacaggggtctcatcacacatctgagtgttaatgatctcacagtgggccgaagcgtggaagagactctccgcttggtgaaggcgttccagtttgtggaagcccatggagaagtctgcccagccaactggacacccgagtctcctacaatcaagccccatccaactgcttccagagaatattt

SEQ ID NO: 14439 - DNA, 444 bp, Bos taurus
  Clone ID: 62-BOVMS1-023-Q1-E1-H10
ccggggccacccacgcgtccgcaccgccctggcccccagcaccatgaagatcaagatcatcgccccacctgagcgcaagtattccgtgtggatcggtggctccatcctggcttcgctgtccaccttccagcagatgtggatcaccaagcaggagtacgacgaggccggcccctccatcgtccaccgcaaatgcttctagacgcctctccgacagccgcgacttctccccaggacgacgaatctgctcgcggcgcaggcggctgacctcgagccaccgcgcagcagctgctctccaaccatcagcgttgccgctgccgcaaactgacacactgtttataatgtgtacatacattgtttacctcattttgttatttttaaaacgaagccctgtggaaggaaatggaaaacttgaagcattaaactcagccgttctgttttgctgcg

SEQ ID NO: 14440 - DNA, 381 bp, Bos taurus
  Clone ID: 62-LIB188-001-Q1-E1-H10
actttgcagaggccctggggccactggagagctttgaagcctggcctgatgacttgctcatcagcacctaccccaagtcgggcaccacctgcgtaagcgagatcctggacctgatctaccaggagggtgacctggagaagtgtcagagagcccctgtcttcttgcgggtgcccttccttgagttcagcgcccctggggttcccacaggtgttgagcttctgaaagatacaccagccccacggctcctcaagacacacttgcctctggccctgcttccgaagaccctgctggatcagaaagtcaaggtgatctacatcgcccgcaacgccaaggatgtggccgtctcctagtaccacttctatcgcatgggcaaagtgcaac

SEQ ID NO: 14441 - DNA, 465 bp, Bos taurus
  unsure (10): unsure at all n locations; Clone ID: 62-LIB188-001-Q1-E1-H6
atgctctacngagccatggccgcgcgataccaatttaataactggaatggggaagagctgcccgcagaacccaaagaactggtcttgatgatccagaatctcaaacaaaaacttcccaagaagaattctgccgaagggaataaatatcacaggaatgtgcctcttctcatccactgcagagatggatctcagcaaacaggaatattttgcgcgttgttcaacctcttagaaagcgctgacacagaagaagtgatagatgtgtttcaagctgtgaagtcgctccgcaaagctcggccaggaatggtccccaccttcgagcaataccaatttctgtatgacgtcattgctagcacctatcctgcccagaatggacaagtaaagaaaagcaagcatccagaagataaggttgagattgataacgaggtggacaaagctaagccggatgctaactgcacaagccccccg

SEQ ID NO: 14442 - DNA, 402 bp, Bos taurus
  Clone ID: 62-LIB188-002-Q1-E1-H10
ggcccgggatactgctacaaccccagccaccaccccgaggagcagctctcctccaaggacctggtgtcctgcgcctaccaggtggcccgaggcatggagtatcttgcctccaagaagtgcatccaccgggacctggccgccaggaacgtcctggtgacggaggacaacgtgatgaagattgcggacttcggtcttgctcgagacatccaccacatcgactactataaaaagacaaccaacggccgactgcccgtcaaatggatggcaccggaggccttgtttgaccggatctacacccaccagagcgacgtgtggtcttttggggtgctcctctgggaaatcttcactctgggcggctccccataccctggggtccccgtggaggagcttttcaagctgctg

SEQ ID NO: 14443 - DNA, 221 bp, Bos taurus
  Clone ID: 62-LIB188-002-Q1-E1-H6
ccgccactggccgcgggatacattattgaggaggacaagggtgatggatggacaagagctcggagacagaacggtgaagaaggctacgttcccacatcatacatagatgtaactctagagaaaaacagtaaaggttcctgaagagggtttctgaggaaatgggcaagatgttgaaggaggttacatgcagctgcttttggggggggaggtgtcagccttga

SEQ ID NO: 14444 - DNA, 273 bp, Bos taurus
  Clone ID: 62-LIB188-004-Q1-E1-H10
gatacaggatgtagcgcttcattcggatggactccagccactcggccacacttcggtaggggatcccgtcggagccgctcaagctgggcaggcgaagggtcaccctgggatcaaagttggcaatggttcgcagggagtgggggttggcatgcagatgctccagctgtgccttcaggcgatggaaggtgggccggcggacacggtcgtaggcccagcagttcttcatgagttcatagaggggggcagggcagtccacgggcgggggcagccggt

SEQ ID NO: 14445 - DNA, 430 bp, Bos taurus
  Clone ID: 62-LIB188-004-Q1-E1-H6
cggataccaaaagaacttcctcctgatactgcgctgctggacctgcaaaacaacaaaataactgagatcaaagatggagactttaagaacctgaagaaccttcatacactgattctcatcaacaacaaaattagcaaaatcagccctggggcatttgctcctttggtgaaattggaacgactttatctttccaagaatcaactgaaggaattgccagagaaaatgcccaaaactcttcaggagctgcgtgtccatgagaacgagatcaccaaagtgcgaaagtctgtgttcaatggattgaaccagatgatcgtcgtagaacttggcaccaacccgctgaagagctcaggcattgaaaatggagcctttcagggaatgaagaagctctcctacatccgcattgctgacacaaatataactaccatccctc

SEQ ID NO: 14446 - DNA, 412 bp, Bos taurus
  Clone ID: 62-LIB188-006-Q1-E1-H10
gatacaattacatatgacttcatataactaattcaagagaaaagacaccacacttggaaaaaaaaaagatttttaaagataatggttttaattgagttaatgagatgaaaaaatcgtgaagccctatgttctacttacatgaaagaagattttttaaaaaataatcactgcacaaaatacaaagggtggggttatgctgtggtattaaatttctctccattatgtttttcttgactgttcaagggcaaattaaagtttccacggcaaatctgttctcaaaatgccgaatcgtaacacagacgtcagctgaacgtttctgaatacctttaatggtttctctgcgttgcagtttataagtttccttatcatggcacagtcgataaatatagaaacccaggtgatcaatgttttc

SEQ ID NO: 14447 - DNA, 395 bp, Bos taurus
  Clone ID: 62-LIB188-006-Q1-E1-H6
gcgacgggcccgggatacatatgatcggccagcccaccgggcactttgacaagcttgttgttgttcaaatgaagttccctcaaatgaggagtgttggccaaagagccattgtcaaccgcagagatgctgttgaaactcagtcccaacttagccaaattattcagtcctttcaggctagctgcatcaactttggtgattttgttgccatcgagatgtaattcagtaagggaaggaggaagaccttgagggatggtagttatatttgtgtcagcaatgcggatgtaggagagcttcttcattccctgaaaggctccattttcaatgcctgagctcttcagcgggttggtgccaagttctacgacgatcatctggttcaatccattgaacacagactt

SEQ ID NO: 14448 - DNA, 312 bp, Bos taurus
  unsure (160): unsure at all n locations; Clone ID: 62-LIB188-007-Q1-E1-H6
gccatgggcccgggataccaaaaaaccttcctcctgatactgcgctgctggacctgcaaaacaacaaaataactgagatcaaagatggagactttaagaacctgaagaaccttcatacactgattctcatcaacaacaaaattagcaaaatcagccctgnggcatttgctcctttggtgaaattggaacgactttatctttccaagaatcaactgaaggaattgccagagaaaatgcccaaaactcttcaagagctgcgtgtccatgagaacgagatcaccaaagtgcgaaagtctgtgttcaatggattga

SEQ ID NO: 14449 - DNA, 384 bp, Bos taurus
  Clone ID: 62-LIB188-008-Q1-E1-H10
gcccgggataccaggacacgtagcacacttccccggccatgaacttctccaggaagctgtcccaggtgccagggtcagggtgcaccttggccatgcgatagaagtggtaataggagacggccacatccttggcgttgcgggcgatgtagatcaccttgactttctgatccagcagggtcttcggaagcagggccagaggcaagtgtgtcttgaggagccgtggggctggtgtatctttcagaagctcaacacctgtgggaaccccatgggcgctgaactcaaggaagggcacccgcaagaagacaggggctctctgacacttctccaggtcaccctcctggtagatcaggtccaggatctcgcttacccaggtggtgcccgact

SEQ ID NO: 14450 - DNA, 147 bp, Bos taurus
  Clone ID: 62-LIB188-008-Q1-E1-H6
gatacattgtgactcagttgaagaagatgaagaaatcctcgggggaaattgtctactgtggacaggtgttcgagaaatcccccctgcgagtgaagaacttcggcatctggctgcgctatgactcccgcagcggcacccacaacatgt

SEQ ID NO: 14451 - DNA, 313 bp, Bos taurus
  Clone ID: 62-LIB188-009-Q1-E1-H6
cgcctgagtgaccacgagaaccagataccccccttcggcgccaagaagccattcctgggtgttgtcaccacgaactggaagctgagccagggaaccgagcggcacctcatgcacctggaattagagatctcggactccacaatcaggtatgagtctggggaccatgtgggtgtttatccggctaatgactctgccctggtgagccagcttggcgagatcgtgggtggcgacttggagatgagcatggccctgaacaacttgataggacccaacagcaagagcccttcccctgcaccaccgcctagggcacggg

SEQ ID NO: 14452 - DNA, 391 bp, Bos taurus
  Clone ID: 62-LIB188-010-Q1-E1-H10
acagagctaaggcacaacctggttgtttccaagagttaggggggcagcagtggagatgggaagcaagccctcttggacgctgggtcccccggtgggcttcttggctgggggctgggcctcagccccgagccccagcaaacccaaggctgtgttgaagaggttgatgggcgtggaaccatcggtgatgagggtggattttaggcccaggctctgcagcaattttacctgcatctccggccctgccacagccatgtctctgatggtgctgggccccagggcctctgtcatctgcttgaacttcttcacctccacctcagccagctgctgggccttgctcacttccagctccagctgggcccgggcatagagcagctccagctctcgtatcact

SEQ ID NO: 14453 - DNA, 275 bp, Bos taurus
  Clone ID: 62-LIB188-010-Q1-E1-H6
acaccgggaatgcaaggcagggatgatctttgacagatagttacatatgaggcaaaatctggtattttcagtaaacttctcaatcactctcctcagggcgttctgggcatcctgagtcatggcatcagcctcatccaagatcaccagtttaaagcctttcgtaaatattgtccttgtgctagcaaagctcaggattggtccccgaacgatatctattcctcggtcatctgaagcattcagctccaagaccatggagccaaattccttatctttgt

SEQ ID NO: 14454 - DNA, 362 bp, Bos taurus
  unsure (344)...(345): unsure at all n locations; Clone ID: 62-LIB188-011-Q1-E1-H6
gccatgggcccgggatacttgtcaaccgactcagtctgccggtctctctgccactccacgtctacatcttctgggtagaagccgatgaccatgcaggtgacgctgaccgtgcttttgctgagctcttccttgggtgggtccaggacatacacctgcggctcccgggccggccctttgctcctggagatgatcctcacgatggaggccgagaggcctttgatgttgaccttgcacttgaactcctttcctccagtccagtcctggtgctggatgggcagggcgctgaccacgcggtaggtgctgttgaactgctcctctctcggcttcgtcctggccgtgtgcannctcacgtcgtccacgaa

SEQ ID NO: 14455 - DNA, 406 bp, Bos taurus
  Clone ID: 62-LIB188-012-Q1-E1-H10
gaaaccatctcaaaacctgagtggttcaaatgccgccgatggcagtggaggatgaagaagctgggtgctccctctatcacctgtgtgaggagggcctttgccttggaatgtatccgggccatcgcggagaaaaaggcggatgctgtgaccctggatggtggcatggtgtttgaggcgggccgggacccctacaaactgcggccagtagcagcagagatctatgggacgaaagagtctccccaaacccactattatgctgtggccgtcgtgaagaatggcagcaactttcagctggaccagctgcaaggccggaagtcctgccatacgggccttggcaggtccgctgggtggatcatccctatgggaatccttcgcccgtacctgcccgggccgccgctcgaacaat

SEQ ID NO: 14456 - DNA, 390 bp, Bos taurus
  Clone ID: 62-LIB188-014-Q1-E1-H10
atacgaccatccaccggatactgcgaagatgctacactcgtcacaaccagtgaacatcattgtctaagagtccagctcgaacggcccctcatcgatgacagctgtggctataggcacctgttttgctgcagtggctattgttgcagccataataacctggttccgcctcaggagaaagccaatctcagttggagcatgggatacagggattccttgtgtcctggatatgaatgaacacactagatgcattgtctcagactccttccccacttcctgaggaatgctgctttgcatatacagagctgctttccgcactggtaaaccggtctcactgatgctgaaattgatgctgccagaactgaggctgaaaacacagtcaacctattcact

SEQ ID NO: 14457 - DNA, 398 bp, Bos taurus
  Clone ID: 62-LIB188-014-Q1-E1-H6
accgggaggcgctggagaagggtgatgttacagctcagatagctctgcagcctgcgttgaagttcaacggtgggggccatatcaatcacagcatcttctggacaaatctgagccctaacggtggtggagaaccccaaggggaattgctggaaaccatcaaacgtgactttggttcctttgccaaatttaaggaaaagttgactgctgtatctgttggtgtccaaggctccggttggggttggctcggcttcaataaggagcagggacgcttacagattgctgcttgttctaaccaggatcccctgcaaggaacaacaggtcttatccccctgctggggattgacgtgtgggagcatgcttattaccttcagtataaaaatgtcaggcccgattatctg

SEQ ID NO: 14458 - DNA, 397 bp, Bos taurus
  Clone ID: 62-LIB188-015-Q1-E1-H6
cccggggcgggatacaaagccgtctggcttatcttcttcatactgggtctggggacgctgctgccctggaatttcttcatgacagccactaagtatttcacaaaccgcctggacatgtcccagaatatgtccttgggccctgctgaagtaagcaaggacatccaggcctcagccagccccctggcaccctcgccagagcggactcatctcagcaccatcttcaacaacgtcatgaccttatgtgccatggtgcccctgctgatcttcacctgcctcaactccttcctgcatcagaggatcccccagtctgtgcggatcctgggcggcctggtaaccatcctgttggtgttcctgatcactgccatcctggtgaaggtgcccctacacgcgctgtcct

SEQ ID NO: 14459 - DNA, 442 bp, Bos taurus
  Clone ID: 62-LIB188-016-Q1-E1-H10
gccatggcggcgggatacttcgtcaatgcaaaaacaatgccagagctctatgaccttgttaacaggtataaacctgacttgatttggtctgatggagagtgggaatgtcctgacacttactggaactctacagattttcttgcttggctctacaatgatagcccagttaaggatgaggtcgtagtgaatgaccgatggggtcagaactgctcctgtcatcatggaggatactacaactgtaaagataaattccagccagagaccttgccagatcacaagtgggagatgtgcacctccatagaccagcggtcctggggctaccgtcgagacatggagatggctgacatcacaaacgaatccacgatcatttcggaactggttcagacagtaagtttgggaggcaactatcttctcaacgtcggaccaaccaaagacggactga

SEQ ID NO: 14460 - DNA, 398 bp, Bos taurus
  Clone ID: 62-LIB188-016-Q1-E1-H6
catggcggccggatactgctgcaatgagcagaagctgctctgtgcctgcttgggcttcccttacaaactcagccttcatttccttgaccagagtggtgagatgccgcttgtctctccacccggggtagagccatgctaggtccagtccatcaaagccatgggtccgcagaaatggtggcaccgacttgatgaaagtcctgcgactccgggtcttggaagctatcttggaaaatctttgagaaccgaagttccatcctccaacagataggagggtcttcaggttggggttcctgttcttgagtgtgttcagtgtgtcatagagcgtcacgtcattccactcccaggtgtcgatctcattgttgcttatgttggcaaagctgtaaatgacatgggtgcac

SEQ ID NO: 14461 - DNA, 269 bp, Bos taurus
  unsure (212): unsure at all n locations; Clone ID: 62-LIB188-017-Q1-E1-H6
gatacgtgctgatgaactgctcctctcttggcttcgacctggccgtgtgcacctccacgtcatccacgaaccaagaaaaacggcacctcggggttatcgtggcccacgttcaccaccacacacgtgacctcgggcgttcctgtgatcatcagggtgtctttgggtttcggtgggaagatgaagacagatggttccctcacgcctgatggcanagacatggcaggagattaatatcggggtctcactcatctaaggcagccatccccctc

SEQ ID NO: 14462 - DNA, 450 bp, Bos taurus
  Clone ID: 62-LIB188-018-Q1-E1-H10
gccatggcggcgggatacaagtggtctgtgcacttctggtgagaattccttgcaccactctcaagtcagctgattccagggacacgccggggcacaggaggcactaggctcgtctggaacggctctttctggcagtgacattttgatttgaaacccaaagtaaatccatacgtggcatcatggttattaaaataatgaaatattactagccaaaggtaactgcaattcaatcaatgttatattttcacacacagaaatttagaaaaatcaagagtatgataataaaaaccataaaattaaacagaagaaaatcaatttctacaagaaatcatatatatgtacctgcccgggcggccgctcgaaccgagactgctgcgttcggcggcggaaccacactgaccgtcctgggtcagcccaagtccccaccctcggtcaacctgttcccgccct

SEQ ID NO: 14463 - DNA, 428 bp, Bos taurus
  Clone ID: 62-LIB188-018-Q1-E1-H6
taccaaaaccatccctatggccccaccaacataagcccccagggctgggtctgtgcccacaaagggttggcctgttttgactgaactaacctgtggatttagtccaacaaatgcatttgcctgatttcagggctgaatttctgcttgacccaagtgtcaggcagagctgggtggcctcagctgactggcggtggacaggctgcaggatgggccgaaagtgcattactagagatgaccgcggttgaggacacctatttcccaggacccatggctatgtgaccacactggccgtgagtgactggttgttgaggatgactactctttagcaaacctattgtgtgtctgtagaagctgtttgatgattaaaacaatggctacttcctgttttggcaaatgcttgactgcattttcatttgaatgaacaatta

SEQ ID NO: 14464 - DNA, 210 bp, Bos taurus
  Clone ID: 62-LIB188-020-Q1-E1-H10
ccatgggcgcgggatactcctattacaacctggatgaaacttgtatccgcttctatcacccggataaagaggacggaatgctgagcaaactctgccacaaagatacctgccgctgtgcagaggagaactgcttcatgcaccacacagagaaggaggtcactctggaggaccggctggacaaggcttgcgagccgggcgtggactatgtgt

SEQ ID NO: 14465 - DNA, 419 bp, Bos taurus
  unsure (401): unsure at all n locations; Clone ID: 62-LIB188-020-Q1-E1-H6
gatacaaagagatgtgatgctcgccaggccccagccctggtgctgggaggggcggagctgcctcgcaatccgcttctttgctttggcccccgtggcctgggtgaaccacctggctgacttcaggaccatccgcttgtgtccccctcgctggcctgcttttcctgtggggcctgggagatgctcacaatgggtcaacccttttaggctgaatgattccttgggtctcgaaaattcagtccaacagcccttggcttctttcgatcggctctgacactggtctacatgactggtctttctaaagtcagtgagtttggttatgtaactctcaacttgaccagttttactaaggggctgacaaatcaaaaacacacttgtcagttcggtgaaaataatgtggtcanacaacgaagtccattgca

SEQ ID NO: 14466 - DNA, 407 bp, Bos taurus
  Clone ID: 62-LIB188-021-Q1-E1-H6
gggaacacagacaaaaccaggcaccaatgtcacaaggaggcaagagtgacgggaaagagcagcctggagccccagatgaaccccccccctcttcttcaagagtgagtgtgggaggggacggggcctggagtgttgagggggcagccttagaacacgtcggcttagtaggcgtggttagagatgaagagggactcgctggctgcagcccctaccttaccacttggggtgtactcctggttggaggtcaaggccacgatgcggtccaggtcttccaccagctgcttgaaggtgggtctctgagaggggaccgcgtgccagcaatctctcatcatcatgtagagctcgttggtgcagttactgggcttgtccatacgatgaccctccttcagcagcttgaaaagctcctc

SEQ ID NO: 14467 - DNA, 402 bp, Bos taurus
  Clone ID: 62-LIB188-022-Q1-E1-H10
actcctcctgggtgtccctccccctccatatctcaccggccctccagagccacccccaaagagatgccttgagattctcaatgcagccatgccttggggctgccttggtgctgccacacttcaggctctcctccttccacaactttctgtggctttacagcaccttgggagccaacagagactacgtcgagagggcaccggtggcccgacagcctggtctggcatggggcagtgggagtggggcaccgtcaggtgaccaccccagacatttggccttctccctgctggctgccttagaactatccctacattagcagtttgctttgtatgcactttgatcttttctttggattcttttgtttttttacttttccactatgacattgcatttccggacggaag

SEQ ID NO: 14468 - DNA, 441 bp, Bos taurus
  Clone ID: 62-LIB188-022-Q1-E1-H6
acttgtcctccgactcagtctgccggtttctctgccactccacggctacatcttctgggtagaagccggtgaccatgcaggtgacgctgagcgtgcttttgctgagctcttccttgggtgggtccaggacatacacctgcggctcccgggccggccctttgctcctggagatgatcctcacgatgggggccgagaggcctttgttgttgaccttgcacttgaactcctttcctccagtccagtcctggtgctggatgggcagggcgctgaccacgcggtacaacgtcttcaagatccactggctcatggcagccctgactttcaccaagagcgtctctctcctcttccacagtatcaactactacttcatcaacagccagggccaacccatcgaaggcctcgctgtcatgcactacatcacgcatctgctgaaaggtgccc

SEQ ID NO: 14469 - DNA, 441 bp, Bos taurus
  Clone ID: 62-LIB188-023-Q1-E1-H6
gccgggcgatacacctctcggaccttacgaggaccagagaggaggacagtgccacagcccttggggggagtccagggccagctggtcgaaggtgaggatcttgcccccggccttgaggatgcgactccgggcgcggctgctcactcgcaaagcacacaccttcagtttgggcacctcctggacacgaacatcatcggttatagtccccacgaccacagctgttttgccctcccggccaggaagcttcatcttccggatcatccgggaaagagagagcggtggcctgttggtgcggctcatgaacaatctcttgaggacaacctgattgaaggtggagttggttcgtctggccaggacctgcccgggcggccgctcgaaccaaaaccttccctatggccccaccaacataagcccccaaggctgggtctgtgcccacaaagg

SEQ ID NO: 14470 - DNA, 445 bp, Bos taurus
  Clone ID: 62-LIB188-024-Q1-E1-H6
gatactccctacactcaccttcctttgctaacaccctttcagcgagtgttttcttcctctgcagaggaaaaacaaattggatttgaaaaatattctcaagtttcatacctgaaatttggggcaaatgtgtccagaccagctagcattctctataaatatcaacaaaagcaggcttggggattctgtgctttgggtccaaggatcctggcaagaaacacatgttgagattcctctagttcagaatttccagggggtggaggtagagccacctcaactgtcttcagcctcagctggctcaattgccaggcttagtggcaactgcccctgccatctcgaagcccatttatcacatttgccctctgctgtgccctcttgccagcttctgtctttggctacagcactttaggcactattctaagtcctggaatatatcactcctttgttt

SEQ ID NO: 14471 - DNA, 428 bp, Bos taurus
  unsure (379): unsure at all n locations; Clone ID: 62-LIB188-025-Q1-E1-H6
atgggcccgggatactcccaactgcactacttacacgtcttccttcgtcttcacctaccctgaggctgactccttccccagctgtgcggctgcccaccgcaagggcagcagcagcaacgagccttcctctgactcgctcagctcacccacgctgctggccctgtgagcgggcagagaggggaggcagtgggcgtgcacgtggccactgcctgagttggcgcattacagagaggagaaacacgccttccctcgagggttcccatagacctagggaggaccttatctgtgcgtgaaacacaccaggctgtgggcctcaaggacttgcaagcgagcatccccgtgtggactcaagtccttacctcttctggagatgtagcanaacgcatggagtgtgtattgttcccagtgacacatctgagagctggtag

SEQ ID NO: 14472 - DNA, 406 bp, Bos taurus
  Clone ID: 62-LIB188-026-Q1-E1-H6
acactagctgcagccactgggctgtctcacacttactgggatactcaattgtcgcaaagtccccacaacttcatcacagacgagagcctgaaaggtcaactgcaggagtatgcccagtgggatagaaactacaacgaacttgctatccctcctacaatttcacggggccctacgctaccaaatccctcaatcgtatcccctgctcattcaccacactgcctgagattcacaagacttcaccatcttcagggacacacgtcctcagcatgctggaatgaatccccatctcaactgacaatggaaattgccgcctcactcttacacacattgcaagttccttcataaactgcgttctatggacatcacttcgactggctcatcaacacatttcccttgtgcaaaatac

SEQ ID NO: 14473 - DNA, 392 bp, Bos taurus
  Clone ID: 62-LIB188-027-Q1-E1-H6
gataaacttgcatggaaaatctcatggacggaagagcctggtaggctgcagtccatggggtcgctcagagtcgggcacgactgagcgacttcactttcacatttcactttcatgcattggaggaggacatggcaacccactccagtgttcttgcctggagaaccccagggactgcggggcctggtgggctgccgtccatggggtcacacagactcggacacgactgaaacgacttcgcagaagaagcagcagcagcagcagcagcagcagtgcatagatatcaaaagggtttagaacagtcaggtaggatcacacaagtcaccgtgaagcaatacttctccacttagccaaagctaacaaaagatttctgttctaggtcaacctagaagaga

SEQ ID NO: 14474 - DNA, 314 bp, Bos taurus
  Clone ID: 62-LIB188-028-Q1-E1-H6
acatgaaaatgctcagatttaccattttgagggggaataggaccaaaaaaacaaggtgtacttatcatctctagatgtgctcactgtatgctccagtatttatatgcataggcccgggtgactggaattgcaattgtcacgcattttaatacactggtcagccatttgtttctggacgaaaaggcatctttagacaggagcactcacgagattccaggatacaaccaatcactctgcattgcagtacgccaccttagcaactacccagcattactcaactgctacataactgcgcctaatgcacacctatacat

SEQ ID NO: 14475 - DNA, 417 bp, Bos taurus
  unsure (378),(391),(406): unsure at all n locations; Clone ID: 62-LIB2809-002-Q1-E1-H6
acagcagaaaggcctgaatgggcatatctctctggggatagggcactgctttctggggaacaggcaggactttggactgagaaagggacagcacggactgaggaggaaacatgacagttggaggaagaggctggtgaggctggtgcatccaagactggagcagaggcagaggaaggtgcagattttcaacatcagtgagagtcaggctctggctttcagtaaagggctcaactggatatttagggaagggcatttctttgtgcttaggagccatagcctccttcactttggagactcccattacttcaggctgaaggaaaggcggcaccaccacaggggtttgagtaagaggagggatgttttgtgggaagctgttanggatgggcccagngaagggatagactanagactgtgtct

SEQ ID NO: 14476 - DNA, 395 bp, Bos taurus
  Clone ID: 62-LIB2809-004-Q1-E1-H10
catggccgggcgatacagaaatccaagtccagacagaacacttggaaatggccccaaaagatcttcttcactgactatcgcaacagaccatcacattcaaaaggacactttcctctcccacctctcctctcctccattcttctgagaatttcatactgagagaaaccaaatactgagctgaaaggtgagtgggtcttctgcaaatctgaaggccagagcaaggaaaacaaagtatggaaagaaaaagataggggacaaccagaagaatcaccagaaagcaaaagaaaaaacaagggcgcaaggtgacaaccatgctcatctcagtctccatccatccttccacgcacggtgaaggtgatttgggaaattcggtaactgagaaatgcagggcacat

SEQ ID NO: 14477 - DNA, 394 bp, Bos taurus
  Clone ID: 62-LIB2809-004-Q1-E1-H6
ccatggccgcgcggatacttggacaaattctcaggggacgatacagacttatttaattgtttggcaaatgtttctgtgatttctctgttgagtatatctttaggaagtctacaagcccttcttaaagattttagatggcaacacttagaaattattaactgtgactttgacaagtttcctgcattgaagctcagttctctcaaaaagtttgttttcacagacaacaaagatataagcacttttactgagtttcagctaccaagccttcagtatctagatctcaaaagaaatcacttgagtttcaagggttgctgttctcacactgattttgggacaagcaacctgaagcatttagatctgagcttcaatgatgtcattaccttaggttcaaact

SEQ ID NO: 14478 - DNA, 246 bp, Bos taurus
  Clone ID: 62-LIB2809-005-Q1-E1-H6
actccttggaaatggcggccagcgacatctccctgctggacgcccagagtgcccccctgagagtgtatgtggaggagctgaagcccacccctgagggcgacctggagatcctgctgcagaaatgggagaacggtgagtgtgctcagaagaagatcattgcagaaaaaaccaagatccctgcggtgttcaagatcgatgccttgaacgagaacaaagtccttgtgctggacaccgactacaaaaagt

SEQ ID NO: 14479 - DNA, 426 bp, Bos taurus
  unsure (392): unsure at all n locations; Clone ID: 62-LIB2809-006-Q1-E1-H10
catggccgccggatacagcagaaaagcctgaatgggcatatctctctggggatagggcactgctttctggggaacaggcaggactttggactgagaaagggacagcacggactgaggaggaaacatgacagttggaggaagaggctggtgaggctggtgcatccaagactggagcagaggcagaggaaggtgcagattttcaacatcagtgagagtcaggctctggctttcagtaaagggcccaactggatatttagggaagggcatttctttgtgcttaggagccatagcctccttcactttggagactcccattacttcaggctgaaggaaaggcggcaccaccacaggggtttgagtaagaggagggatgttttgtgggacgctgttanggatgggcccagggaagggatagactagagactg

SEQ ID NO: 14480 - DNA, 409 bp, Bos taurus
  unsure (380): unsure at all n locations; Clone ID: 62-LIB2809-006-Q1-E1-H6
gccatgggcccgggatacccaggaatcccatggtctcggcaacgctgtaagttgatagcagccaggtcaaagccgtggatcttgtgagtgggctggaaaagcttgttgcgcagctcactcgtcaccattttatcctgattcatcagtttggacttcttggccagcagaccccgcaccagagggtcaattccaccgtctttgattatcctccaggtgttgaagaagagggtgtgtagggggagctctgcttccggacccatggctggtaattctcatccaggcgggacacagtggagggaacctccatgtggccaaagcggaaggcaaaggtgaagacattggaaattcggggatccacagagttattatagccttggtanggcgggatccacttctgcatctcactacc

SEQ ID NO: 14481 - DNA, 345 bp, Bos taurus
  Clone ID: 62-LIB2809-008-Q1-E1-H6
gatacaacagaaaggcctgaatgggcatatctctctggggatagggcactgctttctggggaacaggcaggactttggactgagaaacggacagcacggactgaggaggaaacctgacagttggaggaagaggctggtgaggctggtgcatccaagactcgagcagaggcagaggaaggtgcatactttcaacatcagtgagagtcaggctctggctttcagtaaagggctcaactggatatttagggaagggcatttctttgtgcttaggagccatagcctcctttcactttggagactcccattacttcaggctgaaggaaaggcggcaccatcacaggggtt

SEQ ID NO: 14482 - DNA, 251 bp, Bos taurus
  Clone ID: 62-LIB2809-009-Q1-E1-H6
gggatactttttgtagtcggtgtccagcacaaggactttgttctcattcaaggcatcgatcttgaacaccgcagggatcttggttttttctgcaatgatcttcttctgagcacactcaccgttctcccatttctgcagcacgatctccaggtcgccctcaggggtgggcttcagctcctccacatacactctcaggggggcactctgggcgtccagcagggagatgtcgctggccgccatggccacggagt

SEQ ID NO: 14483 - DNA, 419 bp, Bos taurus
  Clone ID: 62-LIB2809-010-Q1-E1-H6
ggataccacagcaggaaattgttcccaatagtgctgaggaacgacttcacagtatgaaagagggaatccatgcccaacagaaagaacctatgataggagtgaatcaggaactggcctacttctaccctgagcttttcagacaattctaccagctggatgcctatccatctggtgcctggtattacgttccactaggcacacaatacactgatgccccatcattctctgacatccctaatcccattggctctgagaacagtgaaaagactactatgccactgtggtgaagagtcaagtgaattctgagggactccacagttatggtctttgatggttctgaaaattccatgctctacatgtcttttcatctatcatgtcaaaccattctatccaaaggcctcaactgctgttttagaata

SEQ ID NO: 14484 - DNA, 429 bp, Bos taurus
  Clone ID: 62-LIB2809-012-Q1-E1-H10
acgatgctgaccaatttgacatatggaattctacctccctttgtgtggatgttaatcatgccaatcatatggctgttacgcttttttgcaaacgctttcacgttgacacctcacaatggaacagaagcactggtctggcttttccaccaaaagcccgagtctctcaatcctctggtgaaatatctgagtgccaccactggctttggaagcaattatgtgacgtccaaaaagatggacctagatgaagacgctgctgaaaaattttaccaaaagctactgaaacttgaaaaggagattagggtcaccattcaaaaaaccaataaccagaactgaaaatgatgctctctgaaacatactgtgccttttgtgggttctggagtgtgtgggtttctcctgagttggaccatgtgcatttgtggtaaaaagtga

SEQ ID NO: 14485 - DNA, 438 bp, Bos taurus
  Clone ID: 62-LIB2809-014-Q1-E1-H6
gatcgaccgccagggcaggtgccccggctgaccctttccttgagctgtctgagctttaaggtggatggctcaagctagagatatgacagaatcttctgggaagggccttgatgatcttcagcccagacttttgctaaatgaaatggaaaaataactttattttggcaccaaactgaaaaaacaggtcaattgtcaggggagagagtcagcatgcatggtgtgattgataaataggatgagttgaagtgggaaacaaggcaggaagctcctgccgtgatcagacacccctgtctgcccatcacccagtatgctccctttctctcctgactctgggaaatatctgtggagcagggcagtcctaaaactcaaaagcaaatctcaatgtcctgatatactttaggcttaggataaagaagaagcatttagtttgtggtaaaa

SEQ ID NO: 14486 - DNA, 388 bp, Bos taurus
  Clone ID: 62-LIB2809-015-Q1-E1-H10
catgggcccggaatactgaaaaatgaagccattcctcccactgcagaaaaataggtcatctgacggatggggaatctgcacacttcagtgccattttaaaggcagcaactaaacagcccttctttggctgtttttagacatcttggtgggacccacagagaacgaggggttgaaattaaaaggtgggcttcatacagaatcacttactaagcaaagaccctggtgggagacaaaaaaactagtctgggtggagtgtgagccgcagtgaggaggggatcaaggaagggtcctggtttgttagtcctcaatgagaccaaaggtccagcagacagacaagccacgtggacgtagggaaggaccaagacaagacacatctctggaattaggg

SEQ ID NO: 14487 - DNA, 346 bp, Bos taurus
  Clone ID: 62-LIB2809-015-Q1-E1-H6
gccatgggcgcgggatacaaaacaatgacagcacagaatatggactcttccagataaataataaaatttggtgcaaagacgaccagaaccctcactcaagcaacatctgtaacatctcctgtgacaagttcctggatgatgatcttactgatgacattatgtgtgtcaagaagattctggataaagtaggaattaactactggttggcccataaagcactctgttctgagaagctggatcagtggctctgtgagaagttgtgaacacctgctgtctttgctgcttctgtcctctttctgttcctggaactcctctgccccgtggctacctcgttttgcttctttgt

SEQ ID NO: 14488 - DNA, 265 bp, Bos taurus
  Clone ID: 62-LIB2809-016-Q1-E1-H6
ggcctgactgggcatatctccctggggatagggcactgctttctggcgaacaggcaggactttgggctcacagagggacaccacggactgccgacgaaacatgccggtttcaggcacaggctggtgacgctggcgcgtccatcactgacagcacaggcatcggaacgtccatcttttcatcatcagtacaactcaggctctggctttcactctatggctcacctctatacttaggcactggcctttctttgtccttaggcgccat

SEQ ID NO: 14489 - DNA, 233 bp, Bos taurus
  Clone ID: 62-LIB2809-021-Q1-E1-H10
catggaggccagcgacatctccctgctggacgccagagtgccccctgagagtgtatgtggaggagctgaagccacccctgagggcgacctggagatcctgctgcagaaatgggagaatgatgagtgtgctcagaagaagatcattgcagaaaaaaccaagatccctgcggtgttcaagatcgatgccttgaacgagaacaaagtccttgtgctggacaccgactacaaaaagt

SEQ ID NO: 14490 - DNA, 441 bp, Bos taurus
  unsure (411): unsure at all n locations; Clone ID: 62-LIB2809-021-Q1-E1-H6
cgccatggtcgcgggatacgaaaactgggtgtggagtgattcgtggctcagtatgggagaggatggtgtttaaagctaattaaaggtgtggttgagcagttttaaaccatatgtgggtgagacgtggccattggccatgagacaatggccaatgaagtggtgatatcactgaaagatgatgcctgaaaatgcctctaaagtggagagattctagataaaagaaagaagacaaccagcaacttgtggaatcaacaaattgaggttggaaagagccctttgcattttgtttaaaattctttcctctttcattctatctgacctcctcaccttctttactccccttgccaattgctcagatccaccctgtatgaatgacttagaaaatctgagacatgggccctaaagctctanggacaagtcagatgtttatcactgcctgag

SEQ ID NO: 14491 - DNA, 424 bp, Bos taurus
  Clone ID: 62-LIB2809-023-Q1-E1-H10
gggatacaacttaatgcttcttttggctctgaccttgttgatctcgtagcccatgttgttgcaacggttctttctgcagctcaggcagagacctttctcaaaggcttctttggaattgcaccggtaggccttacttggattttcttcattcaacagagagtcaatgaagagatgaacggaacgttcgtgggagcacttcaccagctgatccacatctccaaggcctctctctgcaatcacacggagagcttccccaatgttgcatcctggttggaaagtgcctccgttagggtaaatgtccacatgccctactggtttctggattccgatacttcgacctggtgaccccctggtgaatgtgtgtaaaacgtctacaaaatccgcatcatcaggagaaaggcgacttggagcttctgcatactcg

SEQ ID NO: 14492 - DNA, 221 bp, Bos taurus
  Clone ID: 62-LIB2809-023-Q1-E1-H6
cgatacagggcactcaccccactgcggtcccctctctctattgggcggacccccccgccgggttggagtcttccttgtctctgaatcatgagacatcatcttccacaacatgaccgatggatcatatatctatactttctccaaggcctctttctcgggctccctccggcccttcttctgcttgtagtcctgtggtcaaaagcgtctgactccctgccaat

SEQ ID NO: 14493 - DNA, 379 bp, Bos taurus
  unsure (211): unsure at all n locations; Clone ID: 62-LIB2809-025-Q1-E1-H6
gccatgggcgcgggatacaagctatttttttctttttttttttttttttttttacaggtttatgcctttattgctgaaggaggagcggccccaagcaggaggccccaggaggggcctggaggggcctgggtcccaagaggggtgaatgtggtcccggttcctcctggtcccctgatggggcaagcggagatgacatcgtctgtccccagangggccaaggctcccgggctcccaaaggcgcccgcaagggctcacctagatgtggcactgctcctccagctgggttgggttgaaggacagccggatgtgcattgggaagggccttaagggctttgccaaatttctcaagggctccgtcctcaacttccgggttcctgac

SEQ ID NO: 14494 - DNA, 381 bp, Bos taurus
  Clone ID: 62-LIB2809-026-Q1-E1-H10
gggatacagcaaaaaggcctgaatgggcatatctctctggggatagggcactgctttctggggaacaggcaggactttggactgagaaagggacagcacggactgaggaggaaacatgacagttggaggaagaggctggtgaggctggtgcatccaagactggagcagaggcagaggaaggtgcagattttcaacatcagtgagagtcaggctctggctttcagtaaagggctcaactggatatttagggaagggcatttctttgtgcttaggagccatagcctccttcactttggagactcccattacttcaggctgaaggaaaggcggcaccaccacaggggtttgagtaagaggagggatgttttgtgggaagctgtt

SEQ ID NO: 14495 - DNA, 245 bp, Bos taurus
  Clone ID: 62-LIB2809-027-Q1-E1-H6
gatcatttgtatatgctcatgtgtgaccataccacatagttattaaatagcagaacttgcttaaaaacaaggatttgcggacaatgtcaacttcctctcctcactcatcacgcttttgtcgtgacgcatcattttggacatcttggggagctgaccccgcagcagagggtcgcttcgaccttccttgactcccgccacgtgctcaagaatacggtgtctacgcggagctctgcttcacgaccgcg

SEQ ID NO: 14496 - DNA, 426 bp, Bos taurus
  Clone ID: 62-LIB2809-028-Q1-E1-H6
gggatactttgaattttttcagtctgagaagctgttccagataacccaggtaacgctcagagggcacatcttccttttgaatgtgcttctgctcaacactattgggaacaatttcctcacttgacgaaatgctttcagcttccatttgcttaatatcttccatggcttgatcctgggttgattcactcccaatatccttgctcagttcattgaccttctcctttccaaacacttctggaaaaggtgccacaaaaaacctgagtaaattttcattgaggacttcttgagggagtccttggtgcttgataggatgtttaggcctggcaagagcaacatttaggaaacgaggacaaagtaaacatgaagttcttcatctttacctgccttttggctgttgcccttgcaaagaatacgatggaacatgtc

SEQ ID NO: 14497 - DNA, 407 bp, Bos taurus
  Clone ID: 62-LIB2809-030-Q1-E1-H6
acaactaactttggagttgatattaatagaaattattccaaaattattcttaggtcacaaataactactatcccacataaaaagggaaaaatcccacccaattaaggaaaaggtatcctgtgtatgtttccatggcaatgagtttatgcattctcagattttgtccggctagttatccaccctttatctgatgcatttattccatctctcagagagaaccatatagattcctgacggcatccaggacacgtggctcgtggtggacacacttcatggtggatactgctactataaaaatactcagaacttaagagaattccaagatgctttataaaaagcattagtcatgcctcaaaactgccctttgaggtaggtcagtattattatcccattttaacagaaagaaa

SEQ ID NO: 14498 - DNA, 386 bp, Bos taurus
  Clone ID: 62-LIB2809-032-Q1-E1-H6
acagcagaaaggcctgaatgggcatatctctctggggatagggcactgctttctggggaacaggcaggactttggactgagaaagggacagcacggactgaggaggaaacatgacagttggaggaagaggctggtgaggctggtgcatccaagactggagcagaggcagaggaaggtgcagattttcaacatcagtgagagtcaggctctggctttcagtaaagggctcaactggatatttagggaagggcatttctttgtgcttacgagccatagcctccttcactttggagactcccattacttcaggctgaaggaaaggcggcaccaccacacgggtttgagtaacaggagggatgttttgtgggacgctgttaaggattggc

SEQ ID NO: 14499 - DNA, 286 bp, Bos taurus
  Clone ID: 62-LIB3057-001-Q1-K1-H10
cgccccacgaacgtgcggtgcgttttgggcgagggggcggccgtctttccggccgcgccccgtgtcccgggacgaagggctcttcgcaccggacccagttcccgacgcgcggcggtggctcgccgtgccgcgctacgggagacgcgcacgacggcaccgtggttgggacggcggacgaactgctatgctaggccaactgaagctcccgttgctctgccgcatcactcctgctggtctgaatactgactgactggcattcagtcattatctcacagttggtagcttc

SEQ ID NO: 14500 - DNA, 324 bp, Bos taurus
  Clone ID: 62-LIB3057-001-Q1-K1-H6
gcagcagctggaggacaagctcatctaacgaactcctcgccaagttcctggaaaagaaatatgcagcagctggaggacaagctcaacaacgaactcctcgccaagttcctggaaaagaaatatgcaagttctgccaatttacatttgcccaaactgtccatttctgaaacgtatgatctaaaaagtgtcctgggcgatgtgggcatcaccgaggtcttcagcgatagggctgacctctcagggatcaccaaggaacagcctctgaaggtgtccaaggctctccacaaggctgcactgaccatcgatgagaaagggacagaagct

SEQ ID NO: 14501 - DNA, 372 bp, Bos taurus
  Clone ID: 62-LIB3057-002-Q1-K1-H6
acggcggcgagccgagacgcgcccacagcccatcatggcccggctcttccgggcatcctgccgtctgtccctgctcctggccggcttcattcccccgagccagggacaggagaagtcgaagacggactgccacgctggtgtgggtggcaccatctatgagtacggggccctcaccatcgatggggaggagtacattccccttaagcagtacgctggcaaatacatgctcttcgtcaacgctgccagctactgaggcccgactgtccagtacatataaccgaatgcactgaacgaagagcttgaaccatctggtctggtcatccagtgcttgacctgcaaacaacttggaaaacacgatccaggacagaactc

SEQ ID NO: 14502 - DNA, 357 bp, Bos taurus
  Clone ID: 62-LIB3057-003-Q1-K1-H6
ggtgaagtgtgtttcttgaaatcatcaccaccatggacagcaaaggttcgtcgcagggagggtcccgcctgctcctgctgctggtggtgtcaaatctactcttgtgccagggtgtggtctccacccccgtctgtcccaatgggcctggcaactgccaggtatcccttcgagacctgtttgaccgggcagtcatggtgtcccactacatccatgacctctcctcggaaatgttcaacgaatttgataaacggtatgcccagggcaaagggttcattaccatggccctcaacagctgccatacctcctcccttcctacccctgaagataaagaacaagcccatacagaccgcaccatga

SEQ ID NO: 14503 - DNA, 416 bp, Bos taurus
  Clone ID: 62-LIB3057-007-Q1-K1-H10
gttgaatgcgaagcggattaaggagtacagacagaaggttgaattggagctatcgaacatctgtaatgatgttatgagagtgattgatgagcaccttatcccttcggctgcagctggtgaatccactgtgttttactataagatgaaaggagattattatcgttatcttgctgaatttaagtcaggcaatgagaagaaggaagctgctgatcagtctatgaaagcatatgagtctgctaccgctgcagcagaggctgatttacctcccacacatcccatccgattgggtctagctttaaatttctctgttttctattatgagatcttgaactcccctgaaagagcctgtcatcttgcgaagcaagcttttgatgaagctatttctgagcttgacaccttgaatgaggagtcataca

SEQ ID NO: 14504 - DNA, 391 bp, Bos taurus
  Clone ID: 62-LIB3057-007-Q1-K1-H6
gtgtttggcacctcggaccgtgtctatgagaagctgaaggacctggaggaaggcatcctggccctgatgcgggagctggaagatggcaccccccgggctgggcagatcctcaagcagacctatgacaaatttgacacaaacatgcgcagtgacgacgcgctgctcaagaactacggtctgctctcctgcttccggaaggacctgcataagacggagacgtacctgagggtcatgaagtgccgccgcttcggggaggccagctgtgccttctagttgccagccatctgttgtttgcccctcccccgtgccttccttgaccctggaaggtgccactcccactgtcctttcctaataaaatgaggaaattgcatcgcaaaaaaaaaaaaacaaa

SEQ ID NO: 14505 - DNA, 422 bp, Bos taurus
  Clone ID: 62-LIB3057-008-Q1-K1-H6
gccggaagcagctcaccagcgccgccgttcttcgcggaccttgtgactttagggttcgagctgcacggtgaccacgccgtgttacgaggcggtcatacacgcgtcctagggccacaatgtcgcatccatccccccaggctaagccttccaaccccagtaaccctcgagttttcttcgacgtggacatcggaggggagcgagttggtcgaattgtcttagaattgtttgcagatattgtacccaaaactgcagaaaattttcgtgcattgtgtacaggagaaaaaggcattggacccaccactgggaaacctcttcatttcaaaggatgtcctttccatagaattattaagaaatttatgattcagggtggagacttctcaaatcagaatgggacaggtgggagaaagcatttatggtgaaaa

SEQ ID NO: 14506 - DNA, 429 bp, Bos taurus
  Clone ID: 62-LIB3057-009-Q1-K1-H10
cagcttcgccgacatccaggattgatacagccctggtgggggaggggctcggcaccgccctttctcccccagatacagaggctcctgtctgccccccaacgtccgagactcccaggatctgggttttccttgccagtgaatcgtgtagagtacactgccagtctcttgtcttctcttcaccatggcttcttctgatatccaggtgaaggaactggagaagcgtgcctcaggccaggcttttgagctgattctcagccctcgatcaaaagaatctgtcccagaatttcccctttcccctcctaagaagaaggatctttccctggaggaaattcagaagaaattagaagctgcagaggaaagacgcatgtcccatgaagctgaggtcttgaagcagcttgctgagaaacgggagcacgagaaagaagtgct

SEQ ID NO: 14507 - DNA, 414 bp, Bos taurus
  Clone ID: 62-LIB3057-009-Q1-K1-H6
cggacgcgtgggcggcggcaggcagctgggggtgggggggcggccctggtgtaggggctgtggcggtgcgcggggacccggtgcggtggctgcggtagctgcggagctgacgagaaactactaaagttcctgtggacgcaaagtagaatttcataagaacataatggatggagaagagaaaacctatggtggctgtgagggccctgatgccatgtatgtcaaattgatatcttcagatggtcatgagtttattgtaaagagagaacatgcgctaacatcaggaacaataaaagccatgttgagtggcccaggtcagtttgcggagaatgaaactaatgaagtcaattttagagagatcccttcacatgtgctatcgaaagtatgcatgtaatttacctacaaggttcggtacac

SEQ ID NO: 14508 - DNA, 407 bp, Bos taurus
  Clone ID: 62-LIB3057-011-Q1-K1-H10
gcttgattcttgggttgctgcgctcctggaatgaccctgtgtatcacctaggcaccgaggtacagcgtatgaaaggagccccagatgctatcctatcgagggccatagagattgaggaagaaaacaaacgactgctggaaggcatggacatgatctttggccaggtaattcctggagccaaagagactgagccctaccctgtgtggtcaggactcccgtccctgcaaactaaggatgaagatgcacgttattccgatttttataacctgctccactgcctgcgcagggattcaagcaagattgacacttaccttaagctcctgaattgcagaatcatctacaacaacagctgctaagtccacattgatcctatccatctctgaaatggtgcttaatgatccattccc

SEQ ID NO: 14509 - DNA, 323 bp, Bos taurus
  Clone ID: 62-LIB3057-011-Q1-K1-H6
ccgatttaagcgcaagtactccaacgaggatacgctctccgtggcgctgccgtacttttgggatcactttgataaggatggctggtccctgtggtactctgagtatcgcttccctgaagagctcacccagaccttcatgagttgcaacctcatcactggaatgttccagcgattggacaaactgaggaagaatgcctttgccagtgtcattctctttggaaccaacaatagcagctccatttctggggtctgggtctttcgaggccaggagcttgctttttcgctgaatccagattggcaagtggactacgagtcatacacat

SEQ ID NO: 14510 - DNA, 162 bp, Bos taurus
  Clone ID: 62-LIB3057-012-Q1-K1-H6
tcggactcgtggggtttatcaccatgctccccacgaacgtgcggtgcgggactttcaagaggtcttccacctttcctgccgctccccgtgtcccggtacgaagggctctcctcacctgaccccggtcccgactcgcgtctgttgctcaccttgccgcgcccc

SEQ ID NO: 14511 - DNA, 408 bp, Bos taurus
  Clone ID: 62-LIB3057-013-Q1-K1-H6
ggccagaacccttggtttcaatccattcatattgacactgtggccatcaaaatgaaggagactcttaaggtttggctgtagacccgttttgaccgggttacaggcccggaatgtgcagaatctgacaaatccgtcttcattcttagctgagtggcagaacatcactaagagcgtcagtgaggatcggctcttgattgcaggcacagactcctccgaccttcagcagatcctgaggctactcgaacccaccagggacctgttgttgactagctcttacctgtcacactccagcttaactgggaatcatacaaatttcctggtcacccagtatctggacgcctttggcagcaactggtgcagctggaatgtgtctcaggcgggactcctgacttcctttgtttcgcccca

SEQ ID NO: 14512 - DNA, 184 bp, Bos taurus
  Clone ID: 62-LIB3057-014-Q1-K1-H6
acccgggcagagctggccgacaggctggagccagcagctgagggtcctgggggctgtggccccggcggggaggaagaccccggggagcatgcactcccagtgggcagtgtggagctgcgcccagcggacccctcacagcaccaagaggtgcccctggatgatgcagtgactctgcgggtgcctg

SEQ ID NO: 14513 - DNA, 333 bp, Bos taurus
  Clone ID: 62-LIB3057-015-Q1-K1-H6
gccagtggaaatcatcacacaccatggtcagcaaatgttcctcgcaaatagggggccgggtgctcctgctgctggtggcgtccaatctactcttgtgccaaggtgtggtatctatcctcgtatgtgctaatcggcctggctactcccaattctcagttcaagacctgcattaccatgccgctaagcagctgcaatacctccatgatttctactcgtgaatattcagcgcatgccctacacactctgcatgaagtccttatgagcttgatacttgcgttgatacgctcctggaatgaccctttctatcacctagtcaccgaggtgcggcgtatc

SEQ ID NO: 14514 - DNA, 404 bp, Bos taurus
  Clone ID: 62-LIB3057-016-Q1-K1-H10
gtttcttgaaatcatcaccaccatggactagcaaaggttcgtcgcagaaagggtgcctgctgctcctgctgctggtggtgtcaaatctactcttgtgccagggtgtggtctccacccccgtctgtcccaatgggcctggcaactgccaggtatcccttcgagacctgtttgaccgtgcagtcatggtgtcccactacatccatgacctctcctcggaaatgttcaacgaatttgataaacggtatgcccagtgcaaagggttcattaccatggccctcaacagcttccataccttctgggtgtctacccctgttgataaagaacatgccctacagtactccaccatgaagtccttatgagcttgattcttgtcttgctgctcttttggaatgaccctttctatc

SEQ ID NO: 14515 - DNA, 376 bp, Bos taurus
  Clone ID: 62-LIB3057-016-Q1-K1-H6
ctggtattgctgactcagattctctttctgccatccaatactgtttcttaagcacacgtttctttgtgctgtcaaactgtaatctacaaggatgtatgtaatcatgctttacatataagtaacatttttttcttccaggactctctgctttggatatttttggataatttatgtataatttattctcattctgaccacgattttaagtagcacattaataaatgtgtctaaaaattctggcagtagagactctgcagtttgcagtagacgtaaataaaatgttatagatagcttttttgctttgaattactgaattaaatttaaaggtagaaattgttgagaaatattaaatacacgtacaattgcttttacttag

SEQ ID NO: 14516 - DNA, 395 bp, Bos taurus
  Clone ID: 62-LIB3057-017-Q1-K1-H6
gttctcactaaaatgaaggaaactgctgaggcttatttgggaaagaaggttactcatggagttgttactgtaccagcatatttcaatgatgcccaacgccaggcaaccaaagatgctggaactattgctggactgaatgtcatgaggatcatcaatgagcctacagcagctgctattgcttatggcctggataagagggaaggggagaagaacatcctggtgtttgacctgggtggtggaacctttgatgtgtctcttctcaccattgataatggtgtctttgaagtcttggccactaatggagatactcatctgggtggagaatacttttaccagtctgttatggaacacttcatcaaactctacaaaaagaagactgtcaaagatgttcggaa

SEQ ID NO: 14517 - DNA, 343 bp, Bos taurus
  Clone ID: 62-LIB3057-019-Q1-K1-H6
gcccaacagacccaccatgaagtccttatgagcttgattcttgggttgctgcgctcctggaatgaccctctctatcacctagtcaccgaggtgcggggtatgaaaggagccccagatgctatcctatcgagggccatagagattgaggaagaaaacaaacgacttctggaaggcatggagatgatatttggccaggttattcctggagccaaagagactgagccctaccctgtgtggtcaggactcccgtccctgcaaactaaggatgaagatgcacgttattccgctttttataacctgctccactgcctgcgcagggattcaagcaagattgacactttac

SEQ ID NO: 14518 - DNA, 419 bp, Bos taurus
  Clone ID: 62-LIB3057-020-Q1-K1-H10
ctcgcgccatcccgctcagccccccgcgccatcccgctcagccccccacgtcactgaggccggcggacccctcccctccgttcctccctcctaggcccccgccccgccccgctccatcccgccctccgctgctggacgcgcggctcgatcggccgcagccgccgccttgctggcccctcgcccgcccagtcgcccggaccatggcctccgaggtggcgcggcacctgctctttcagtctcacattacaacaaagacagctcatacgtcctcacaagtatctgaccatgaacagaaacaaatagacagccctcgctctttaaccatgtctggccatgttggttttgagagtctgcctgatcagctggtcaacaggtccatccagcaaggcttctgctttaatattctctgtgtgggagag

SEQ ID NO: 14519 - DNA, 323 bp, Bos taurus
  Clone ID: 62-LIB3057-020-Q1-K1-H6
acgcgtccggtctgtgagcgcctctttggttccatcatgaagccggacaaacaggaatgcgttcggcggccgtcgtgacctcggggccctgtgttgcagcactgaggtgccgggggtgtgttgctggctatgtgaactctcagaggtccaggaaagggcatttcggaggctgcctgacaccaccccatcccccacaacccctctcaaaagagggtggaagataagatgaaagctgtgggactcttggaggctacccagtctctgtactggcttagaaagttcttaccacatggggttttctaataaaaacaaatgccaccctg

SEQ ID NO: 14520 - DNA, 296 bp, Bos taurus
  Clone ID: 62-LIB3057-025-Q1-K1-H6
tcccgggtcgacctggacccacgcgtccggttctagatcgcgggcggccgctcgcgatctaggcccacgcgtccgtggctctgtaggtcacagtgctctttcttctcactgtatccaggttccctcccagaggagctgccagttctcttgggcggccctcagtttctctctcctctccagctgactaaactttttttctgtaccagttaatttttccaactactaatagaataaaggcagttttctaaaaaaaaaaacaaaaaaaaaatagaaacaaaactgaataaagaatcaag

SEQ ID NO: 14521 - DNA, 411 bp, Bos taurus
  Clone ID: 62-LIB3058-002-Q1-K1-H6
gaataaaccaaacctttagttatatgcaagccttttttgaggttgctgttgctgtacctgagaactgtggttaggttatgagtttgttcctcaaaaaaaaaaaaaaaaaaaaaaaaaaaaaaaaaaaaaaaaaaaaaaaaaaaaaaaaaaaaacaaaaaaaaaaaaaaaaaaaaaaaaaaaaaaaaaaaaaaaaaaaaaaaaaaaaaaaaaaaaaaaaaaaaaaggaattataattaaaaaaataaaaatttaaaatataaattaatataaaataaaaaatttaatataaatataaaaaaatttaaaataatttaataatattaaaaaattataaaaataataaaaaatatgaatttaaaaaaatttaaaaatatatttaaaaaaaataattatatataaaaatttatttt

SEQ ID NO: 14522 - DNA, 220 bp, Bos taurus
  Clone ID: 62-LIB3058-003-Q1-K1-H10
cggacgcgtgggctagatcgcgagcggccgcccttttttttttttttttttttttttttttttttttttttttttttttttttttttttttttttttttttttttttttttttttttttttttttttttttttttttttttttttttttttttttttttttttttttttatttgaattttatattttcattataatttgttaatttttattgattatata

SEQ ID NO: 14523 - DNA, 426 bp, Bos taurus
  Clone ID: 62-LIB3058-005-Q1-K1-H6
gagatagatagcacgcttgcgcggttgtcacagggctgcttggttggtcagtggggagtcggcgcctgcgtactaagacccgtgtgcagcatcggcggcggcggtagaggcggcggcggcggcggcggcagcggcagcggcagtgggctcggaggcagcggttgggctcgcggcgagcggacggtgtcgagtcagtgcgttcgcgcgagttggaatcgtagcctgttaaaatggcagatgatttggacttggagacaggagatgcatgggcctcatgcacctttccgatgcagtgctcagcattacgtaagaatggctttgtggtgctcaaaggccggccatgttggattgtggagatgtcaacttcgtagaccggcagtgacggtcatgccaaggtccatctggttggtattgacatcgtgactg

SEQ ID NO: 14524 - DNA, 413 bp, Bos taurus
  Clone ID: 62-LIB3058-007-Q1-K1-H6
ggcagattctttaccactgagccaccagacaggccctgggacaactgggtatccacatgcaaaagaaagatattggaccacaaattacagtatttacaaaaattaactcaaagcatatcaaagacctaaatgtaagagttcaaactacaaaacttggaagaaaacacaggagtaaatctttatgatcctgcatgaagcaatagtttcttaaacatataacagacaccaacagtgcaagcaataaaagaaaaaaataaattgaatttcatcaaaattaaaaactgttgtttcaaaggacaccattaagaaagtgaaaaccacacaaagaatgggagaacatatttgcaaatcatatatctgataagagacttgaatctagattacataaataatatgacaccctgggacttccc

SEQ ID NO: 14525 - DNA, 400 bp, Bos taurus
  Clone ID: 62-LIB3058-008-Q1-K1-H10
gttctagatcgcgagcggccgccctttttttttttttttttttttttttttttttttgaacgaccattcgagttttattcacgacagctttttcgaacactcacatcctgtctgggaacagaaatgtccagcatgagcttaaataactttcatacactatgtacagtcattggccagcgtacaaaacatacatacacctgtgcgaccacccagcggaggagctgagccaaacacagccccgcgccctggcaggggatggctagaaaagagctggtgggcggggcaggggtcttctctgaccctgggctcccccgcagggccctcgggacaggtgttcagagggctgggccagggagctgtgggggccggagtgccctctgagctccaggggtggtggggg

SEQ ID NO: 14526 - DNA, 210 bp, Bos taurus
  Clone ID: 62-LIB3058-008-Q1-K1-H6
gttctagatcgcgagcggtcgccctttttttttttctgtttatttttgttgaaaagtgaaatgttataaatttatttgggacatctattgccacctctttggaagcctttgaaaattcaggcagaaatcactacacgtccatcttttgttctactttcaataaatattacctttgagtatatgcatattatggaattatttaggacacat

SEQ ID NO: 14527 - DNA, 311 bp, Bos taurus
  Clone ID: 62-LIB3058-009-Q1-K1-H6
ttcttggaaaactgttatttagctctggtccctttcctacaccattcttaaatggtttacgctctagctagatgtgaagtgaagtgcagtagctcagctgtgtccaactctttgtgatcccatggactgtagccttccagcctgctccatccatgagattttccaggcaagagtactggagtgggttgtcatttccttctcaaggggatcttcctgaccctgggattgaaccctggtctaacacattgcacgcacactctgtactgtctgagccagacttaaagagatgtcatcatttaacttattattag

SEQ ID NO: 14528 - DNA, 405 bp, Bos taurus
  Clone ID: 62-LIB3058-010-Q1-K1-H6
gaagaatttgaacatcagcagaaggagctggaaaaagtctgcaaccccatcattaccaagctgtaccagagtgcaggaggcatgcctgggggaatgccaggaggaatgcctgggggcttccctggtggtggagctcctccatcaggtggtgcctcctctgggcccaccattgaagaggttgattaagccagcctagcatagatttagcattgttccacacaaaacatggaaggacccaaattgtagcaaattccgtggcagttacgaagttgagctgctatagtaaataaactgggcattcttgatacttgaacatggaatgtgtgtgcacatggaaaaacattgcactttacaagcactgtattgtaagtggaaaaatgcaatgtcttaaataaaattgtattt

SEQ ID NO: 14529 - DNA, 231 bp, Bos taurus
  Clone ID: 62-LIB3058-011-Q1-K1-H6
cgcgagctgtcgtcctttatgttcaacgccatagatccgctaaccttagatagatctatggaaatgggttcgaattacagcgtttagaagatgagaataatgcaagtacatagtataccttgcattatatactttgattcatacacacgacttgctttatgtgcgtgtgtattccatgtgtgaacagtaattggattttatgctataatggaagcagtaggtgtgtatagt

SEQ ID NO: 14530 - DNA, 445 bp, Bos taurus
  Clone ID: 62-LIB3058-012-Q1-K1-H10
cgccccgcgacgcgcggacaagaagccggctaagggcccacagcccgagaagcgctcgcacaagaagggcgctgcttccaagaaggacaaaggcagcaaggccaagaaggcggcggccgcgggtggcaagaaggtgaagaaggcggccaagcccagcgtccccaaagtgcccaagggccgcaagtgagcgcggggccctggcgcccacttttccaccccgagtgcacgtaggttttgcgcggagcccgaaccgccgtgcgcgctccgacaacagtgggcccgggccgtgccggcctgcccatcccccaacgtgggagtatttcttattgttgttccccgattattgttcgctctagatttttgaaacggccctggcgacgcccttattggctctcgcgctagcactgggctgtcgccttggttaccggctccggggcgccaatgg

SEQ ID NO: 14531 - DNA, 211 bp, Bos taurus
  Clone ID: 62-LIB3058-014-Q1-K1-H10
cgacggatggactccactcgtccacgtcgaccggtctccaacatgtcaccgttcagacctcctgcgccagcctgcgggctaggcaacgactccggacatcaaacatggactgctgcaccgagagcgcctgctcgaagccggacgacgtcattctagacatccatatggacgatccgtgtgccatcgcggtcgctgtcaaagtccaggcgag

SEQ ID NO: 14532 - DNA, 412 bp, Bos taurus
  Clone ID: 62-LIB3058-016-Q1-K1-H10
agaagatgcagagcagcctgaggctggtggactgcatcatcgaggtccatgacgcccggatcccactgtcgggccgaaaccctctgtttcaggaaacccttgggcttaagcctcacttgctcgtcctcaacaaaatggacctggcagatctgaaggagcagcagaaaattatccaacacttagaaagagaaggcataaaacatgttgtttttaccaactgtgtgaaggatgaaaatgtcaagcaggtcatcccaacggtcacggagctggttgggagcagctaccgctatcaccgaggagagcacgtggagtactgcatcatggtgatcggggtccccaacgtgggcaagtcctcgcttatcaactccctgcggaggcagcacctcaggaaaggaaaagccaccagggtggg

SEQ ID NO: 14533 - DNA, 358 bp, Bos taurus
  Clone ID: 62-LIB3058-018-Q1-K1-H6
tgtgagagcacccgtgatgatgaccccctgctgcggactggctcggtgttgggggggcttgaccgggacgtgaatcgccggtacccgcactaccccagcgacctgcgggacgccctgcactcccagtgcgtggccgccgtgcttatcatctacttcgctgccctcagccccgacatcaccttcggggggctgctaggggagaagacggtggggctgatgggtgtgtctgagctgatcgtgtacacggctgtgcttggcgaactgttttctctgctgggggcccagccgctgctcgtggtcggcttctctgggccactgctcgtattcgaagaagccttctttaagttctgccgggccc

SEQ ID NO: 14534 - DNA, 460 bp, Bos taurus
  Clone ID: 62-LIB3058-019-Q1-K1-H6
gcaagaccgacgtaccagcgcaacgaggagaacgcgcagcgcgaggcccacaagaagatcgagaagcagctgcagaaggacatgcaggtctaccgggccacgcaccgtctgctgctgctgggtgctgtagaatctgctaaaagctccattgtgaaccacatgaggatcctgcatgtgaatgggtataatggagatagtgataaggccaccaaagtgcacgacatcatgcacaacctgaaagacgccattgaaaccatcgtggacgccatgagcaacctggtgcccactgtggagctggccaacccacagaaccagttcagagtggattacatactgagcgtgatgaacatcccggactacgatttgcattccgaattctacgagcatgcctaggctctttggaaggatgaatgggtgcatgcctgctatgagcgctgcaacgagtactagatgattgact

SEQ ID NO: 14535 - DNA, 212 bp, Bos taurus
  Clone ID: 62-LIB3058-020-Q1-K1-H10
ctcgaagggagggctggctcccagttggcccatgggaccctcgagagggcctctatctgttcccttatcccaggttgggggtggggcaccccagctgccctgatggatgggtcccttttctctcagggcaccccaacccccactcatatgtaacatgctctcaccccaatccctttgcatggcgctctgatgagtatttaaagccagttttg

SEQ ID NO: 14536 - DNA, 320 bp, Bos taurus
  Clone ID: 62-LIB3058-021-Q1-K1-H6
gttctagatcgcgagcggccgtccttttttttttttttatattttttttattatattttttttggatttatatgatatttattaagattatttctttaatttttaaattttttatatgaatttcataagtatgttcaaagaaaggcccattctgtttataattttgagaaatctgttgtcatgaatgcgtttgaacacttacaacaattagaattaataaggcccatggaaagaacatcattaaatgcacagatggagtatcagctgatgaaactaattttagataatacacaaattatgaatgctttgcataaataccc

SEQ ID NO: 14537 - DNA, 467 bp, Bos taurus
  unsure (430): unsure at all n locations; Clone ID: 62-LIB3058-022-Q1-K1-H10
ctttattgaggagattccggacgagaccatggttataggaaactaccggacgcagctgtatgacaagcagcgagaggagtaccagccggccacccctgggcttggcatgttcgtggaggttaaagacccagaagataaagttatcctggcccggcagtatggctctgaaggcagattcaccttcacctcgcatacccctggtgagcatcagatctgtcttcactccaattccaccaagttctctctctttgctggaggcatgctgagagttcacctggacatccaggtaggtgaacatgccaacgactatgcagaaattgctgccaaagacaagttgagtgagctgcagctacgagtgcgacagctggtcgagcaagtggagcagatccagaaagagcagaactaccagcggtggcgagaggaacgcttncggcagaccagcgagagcaccaaccaaagggtgctgt

SEQ ID NO: 14538 - DNA, 479 bp, Bos taurus
  Clone ID: 62-LIB3058-022-Q1-K1-H6
cgccgctccgccttcgccgccggtcgacaccgcaaccagttcgccatggatgatgatattgctgcgctcgtggtcgacaacggctccggcatgtgcaaggccggcttcgcgggcgacgatgctccccgggccgtcttcccgtccatcgtggggcgccctcggcaccagggcgtaatggtgggcatgggccagaaggactcgtacgtgggggatgaggctcagagcaagagaggcatcctgaccctcaagtaccccattgagcacggcatcgtcaccaactgggacgacatggagaagatctggcaccacaccttctacaacgagctccgtgtggcccctgaggagcaccccgtgctgctgaccgaggcccccctgaaccccaaggccaaccgtgagaagatgacccagatcatgttcgagaccttcaacacccctgccatgtacgtggccatccaggctgtgctgtccctgtatgcctc

SEQ ID NO: 14539 - DNA, 233 bp, Bos taurus
  Clone ID: 62-LIB3058-024-Q1-K1-H10
gtgacaccccgcacacctccttcatcgttaggaaaggggcgaggactgtccgtgaacagatttagctggggggctgagggccagaagccaggattcggctatggaggcagagcgtctgactacaaatcggctcacaagggactcatggggcacgacgcccaatgcacgctttccaaaaacttcatactgggaggacgagacagccgttacgggtcccctatggcaagactctg

SEQ ID NO: 14540 - DNA, 369 bp, Bos taurus
  Clone ID: 62-LIB3058-024-Q1-K1-H6
gtgacagaaggagaaggagatggaacgatcaaatcacggagaaacactaaaattactgaatccacaacagctcgccttatttttcttggacccaaactgtcagggtataaacactatttgtttcttttttaaaacatctatagttttgctgtaaataataacactgtataaattctaacagaaaaatagaataaatgttgataaggcactgcctcttagaacacaaacagaatattgcaaatgcatttaacataataggggtctcaagtgacttcaccctagaagagggaggaaggttaatgggtggggggatcttcactgattcttgtacattaacaattataatgtttgtatatgcaaaactgctag

SEQ ID NO: 14541 - DNA, 423 bp, Bos taurus
  unsure (376)...(377),(388): unsure at all n locations; Clone ID: 62-LIB3058-025-Q1-K1-H6
cagcagtgatggcaacagctcacaactcaataaatggtgatatctgagactcactcatgctgatcgtcctctcagcttccccttgaaaaggaagcctagagtaggaccaccccagacaccacaggatagaagggagacatggggggaggggcggtggagatgagggatggggaaggcaccaggaccagcgtgcggggacacacacgcacacacgcacgcacaggcaaagaccaggggtgtccatctctgctccaaccggcggccgcgagaacatcagggaaggaccaggcgtccaagagacatttcagtccttcctgtcatgaagcgtctgccgagaggggctgggccacgattactggtctctgccccacgcgtnncgccacgcgtncgcaagaaacacatacagtataaattcttagatga

SEQ ID NO: 14542 - DNA, 425 bp, Bos taurus
  Clone ID: 62-LIB3058-026-Q1-K1-H10
agatcgcgagcggccgcccttttttttttttttttttttttttttttttttttttttggttttttttgttttttttttttttttttttttttttttttttgggggggattacagtttataaagggttcttaagttttacaaaggaaaagggggttaggggctgggcttattcaaaggtgggggggtaaccactggcaaaccgggactaaatttttggacctgggcacctcctaaagtactccaaccttaacggacatgtcctgccaggcttgcggaaaaatacatgctaaaaacacttaatggggtgggaaccaaactaaaaccacgacagttaagggggtaaaaagggaccaaattttttgccccaaagtagtttccccgaattcatagcaattggaaatgtttacaagcaggcatcagtggga

SEQ ID NO: 14543 - DNA, 237 bp, Bos taurus
  Clone ID: 62-LIB3058-027-Q1-K1-H6
gttctagatcgcgagcggccgcccttttttttttttttttttttttttttttttttggttttttttttttttttgttttttttttttttttttttttttttttttttttttttttttttttttttttttttttttttttttttttttttttttttttttttttttttttttttttttttatttttttttaattttattgttaattatattattatttaatgaggttttgatattgat

SEQ ID NO: 14544 - DNA, 399 bp, Bos taurus
  Clone ID: 62-LIB3058-028-Q1-K1-H10
cggacgcgtgggacaaattggaaaatgaattgagaaccacaaagagcgaaatggcaagatacctcaaggaataccaagacctcctcaatgtcaagatggctttggacattgagattgcagcttacaggaaactcttggaaggtgaggagacccggctcagtttcaccagtgtgggcagcctaaccaccggttacacccagagctcccaggtctttggccgatctgcctatggaggtttgcagaccagctcctatttgatgtctgcccgctccttcccgtcctactacaccagccacgtccaggaggagcagatagaggtggaggagaccatcgaggctgctaaagctgaagaagccaaggacgagccgtcctctgaaggagaagcagaagaagaggaga

SEQ ID NO: 14545 - DNA, 279 bp, Bos taurus
  unsure (61): unsure at all n locations; Clone ID: 62-LIB3058-028-Q1-K1-H6
cggacgcgtggggctacgtggccctggacttcgagcaggagatggccaccggggccgccanctcctccctggagaagagctacgagcttcctgacgggcaggtcatcaccatcggcaatgagcggttccgctgccctgaggctctcttccagccttccttcctgggcatggaatcctgcggcattcacgaaactaccttcaattccatcatgaagtgtgacgtcgacatccgcaaggacctctacgccaacacggtgctgtccggcgggaccaccatgt

SEQ ID NO: 14546 - DNA, 407 bp, Bos taurus
  Clone ID: 62-LIB3058-030-Q1-K1-H10
tcccggttggacgccacgcgtccgcgagtcattgaatgtgattctggatgaaaaccacctggaagatgcctgcaatcacctggctgattacctggaggtttactggacgtcgacccaccacccagaccccggacctgagcttctgggcccttccagtgccatcctcggacttcagaaccagcaactgctaggggagcgtggcgaggagcactagcccctggagcgggacaacctgatgccctcatatgaggccagcgagagctacctccaagcctgcacgggatcttcacagctcaactccctccacctggaggaagactatgcagatgcctatcacgacctgtaccagtctcaccggcaacacaccttgctgctgtctaatgcaaacgggcacgacccccatgacc

SEQ ID NO: 14547 - DNA, 321 bp, Bos taurus
  Clone ID: 62-LIB3058-031-Q1-K1-H6
ttcgccctggaggcttcggccagccgttcctccacgcggtcctcggtctcgggcaccgcgagcagccggtgctgggtcttggcccccagcttgtggtcgggccggtgctcgggccgcgagccgggccgtgggtccagcttgcagtcagcccggtacttgccctcgccctcccgcttgaaggaggcggagggcatggccttgggcttggggggctgcagccacgcgtggctgaagatctcgtcgatgtgcaggcgccgggtgacgtttctttggctgcatgatgcggtagatgaggtccttgcacttacccgtcaggttttt

SEQ ID NO: 14548 - DNA, 366 bp, Bos taurus
  Clone ID: 62-LIB3058-034-Q1-K1-H6
gacccacgcgtccgttgaggcagtggttctgaccatgtggttttgggaaatgtgccttttcgagaattgaccagaagcttccagctaggtggaggagaggcaggtatgccttggggcttaacacccaggggtaatgatctctatcttgacagaagcagcaccgcccagcctggatgtcccctttgctctgtgaccgtagcagccctgaacagactagaatctgtctttttcagataccaggctgcccccatagacccacccaagtgaaacggccttttcccccactgtgtccctcacagaggccagataactcttccacttcatctaacttgatcctcacaataaccttattaacttggtggtggg

SEQ ID NO: 14549 - DNA, 379 bp, Bos taurus
  Clone ID: 62-LIB3058-038-Q1-K1-H6
gccgaaggcgaagaaggaagcctttgctcctcctaaagctgaagccaaagcaaaggctttgaaggccaagaaagcagtgttgaaaggtgtccacagccacaaaaaaaagaagatccggacgtcgcccaccttccggcggcccaaaacactgcggctcaggaggcagcccaaataccctcggaagagcgcgcctaggagaaacaaacttgaccactatgccatcatcaaattccccctcaccaccgagtcagccatgaagaaaatagaagacaacaacacactggtattcattgtggacgtcaaggccaacaagcaccaaattaaacaggctgtgaagaagctctatgacattgacgtggctaaggtcaatactctgatc

SEQ ID NO: 14550 - DNA, 433 bp, Bos taurus
  unsure (402): unsure at all n locations; Clone ID: 62-LIB3058-039-Q1-K1-H6
cgacccacgcgtccgcacagacacacagacacacactcacacttacacacacacacacacactttgcaaaaaagaaaaaaaaagatgttttttcccactttgtctctgaacctgtctcctcccaggtttcttctttggagaagtttttctaaaccaaacagacaagcaggcgggcagcctgagagctggcccagaggccccctggccggggaaaccccacgtcgaggagggcacatggcaggtctagagatacccttcacttttctctgggggttttcctctctggaccctgctgacgtgagaccagacgacacccctactgcccagagacatgggcggggccaggatggctgctgttcttctcaagctccccagtaaggggacctgctggggactggcggngggcgtcaggcatcagggcagcaaggctggc

SEQ ID NO: 14551 - DNA, 407 bp, Bos taurus
  unsure (28): unsure at all n locations; Clone ID: 62-LIB3058-040-Q1-K1-H6
gcgatcgcgagcggccgtccttttttanattattttgtctgcaatccttaaatagagttatggaaatggttttgaattacagcatttagaaaataaaaataatctcaatacataatataccctccattatatacttttcttctcccacacgcgctgttttttgtgcgtgtgtattccactgtcaaacagtaattggattttatgctataaaagaagcagtaggtgtgccctctctctaaaaataaaactgcaatcatcatcgcaacgtgaagcctgagatttaagcctgaggaggtgtccgtgctgggcctggggccgctctggggccagggtcccagggggtcagaggggtgggagtaatggcagccgaaaggtcatcaccgggtcctcagccccctggagcgccc

SEQ ID NO: 14552 - DNA, 396 bp, Bos taurus
  unsure (261): unsure at all n locations; Clone ID: 62-LIB3058-041-Q1-K1-H10
gagctgagagctgatggaactgggaaggaaattgaaggtgaagccaccccggagaacatcacagagcctgccaagctggcagttaagtttttctggttcatgccgtcagctccgtactgggtcctggccaccgactatgagaactacgccctcgtgtactcctgtaccacaatcatctggctttttcacatggatcatgtttggatcttgggaagaaacccttatctcccttcagaaacagtgacctatctcaaagatatnctgacctctaataacattgaagttgagaaaatgacgatcacagatcaggtgaactgtcccgagtccatgtaaccaggttctaaagggagctgcattcactccatgttccttctcttgctttgcttttcccctata

SEQ ID NO: 14553 - DNA, 291 bp, Bos taurus
  unsure (21): unsure at all n locations; Clone ID: 62-LIB3058-042-Q1-K1-H10
ggataatgtggtccacaaggnattggttttttacaacttttttaatatatatggttagaaacaggtcacgtgataaaatagcacaagaaacacttaccaaatataaggttatatcttccgcatatacaggagaatgaggtcgttatgtacaataagaaaatgattttaggggttggttggttttgctttcactctgtccccctaatttttcctactacagtcgttggaaatatcacagcttcagttgcattaatactttggacaaatggacagctgccccttcccactggg

SEQ ID NO: 14554 - DNA, 447 bp, Bos taurus
  unsure (408): unsure at all n locations; Clone ID: 62-LIB3058-045-Q1-K1-H6
actagataatgaatatccttagttgagtcactaagatttaataaacaaaatgataattgtttttaatatctagcattacagagcactgaatgcttaacagtttgcaacagaaagcctccactacaaaagaagtttgcacaggtattagcaatgcaatccagataaggcttttaatctaaaatgctggagagttttcttccccaaaacagaattacaaagaacaggagatagcttcctttgttttaaataggaggcagaattattcttttagaaagcagttcccactgtttctgttaacctattctaggaacagtagaaaaatctgtgtactccacagcgaacttacacatgataaagacagaattcctgaaccctgcaatagtctgtttctatcaggatagtacttgngatgctgctttattggctttgaaaacactgtaaaataag

SEQ ID NO: 14555 - DNA, 316 bp, Bos taurus
  unsure (18): unsure at all n locations; Clone ID: 62-LIB3058-046-Q1-K1-H6
gggaactggctgaccagngcacatgttttcagggctgcttggttttccacagctgtggtgggggaactggttctgggttcacctgcctgctgatggaacgcctctcagtagattatggcaagaagtccaagctggaggtctgcatgtacccagccccccaggtgtgcacagctgtcgaagagccctacaactcgcatcctcaccacgcacaccaccctggagcactctagatgggccgagatggtagacaatgaggccatctatgacatctggcgtagaaacctcgacattgagcgcccggcatatactaacctga

SEQ ID NO: 14556 - DNA, 411 bp, Bos taurus
  Clone ID: 62-LIB3058-047-Q1-K1-H6
tagatcgcgagcggccgccctttttttttttttttaatgggaaaaggaatttgtgaagcttattttaggatgagcctctcctagacttgccctagacattacatatattcctcgggtcatattgaaaagcaaaaggggcaggattggggtcacagctgcttgttctgcacggaccaagtgggccttggggattcagcattctccagaagtggctacgggactgatttacagaacgccaaggaggtgcaacttgaggctccgctaacaaagcagcgatgagactgctgggtggccaactttctgtacagaaaattggaatctagattctgtcatttaccaacaaaggcaaaggaaaaagtggtgcaattatgcaatccatttaactcacaaacatattaccctgaataactg

SEQ ID NO: 14557 - DNA, 439 bp, Bos taurus
  Clone ID: 62-LIB3058-048-Q1-K1-H10
gactgccgtgacatcatccagcgcaatcacctccgtcagtatgagctgctctaagaagggaacctccagatttaattaaggccttaagcgcaattaattaaaagtaagatataattgtacacgcagttgatcacccaccatagggcatgattaacaaagcaacctttcctttccctcaagtgattttgcgaaacccccttcaccttacagcttgcttaaatattccaaatttagaaagcttaaggcagcctatagattaagattaagaaacaaaggccacaaatgttcccttctctctttaagtaactacaataatagcagcaaacagaaataaataaatgaaataaatgaagcaaatgaaataaatatcgtgttgtgcagcattaaaaaaatcaaaatacaaattaaatgtgagcaaaaaaaaaaaaaaaagggcggc

SEQ ID NO: 14558 - DNA, 379 bp, Bos taurus
  unsure (30): unsure at all n locations; Clone ID: 62-LIB3058-048-Q1-K1-H6
cgcgagcggccgcccttttttttttaatanttttttttttttttttttttttttttggggttttttttaattttttttgtttttttttttttaaggggtaaaaatttattaattaaaaaattgaaaagggggggaaaattacccaattaaactttttaaagggtacaaatttaaaatttttaaaaaaaaaaacttaaaaaaattttcctttttaaaaaatccccggaacgggggcttaaattaccaaaaagttgcgaaaaacttaaaaactaaattaaaggccttaattggttttttttcaaaaaacccctttttgtaaaaaccggattttaaagtttggcccaattaaaatttttggggtttaaaatggccacccccc

SEQ ID NO: 14559 - DNA, 186 bp, Bos taurus
  Clone ID: 62-LIB3058-049-Q1-K1-H6
tagatgcgagcggccgcccttttttttgctgccccattctaaatacttctgctaatagataattgctctttagttactaagagataaaactttacctataaaaatgtattttgaaaacttactttacacagcaattttgtatccactgaaactaaccttttaccaataaagcactattgtttagat

SEQ ID NO: 14560 - DNA, 448 bp, Bos taurus
  Clone ID: 62-LIB3058-050-Q1-K1-H10
gcattggagcgacgcgtcgcgagcccctatacctgtgtgcagtagccgcgcatcccgagccggaccacgtcggagttcctctggacccaagacatcagaagccatgtcgaagcaccacagcgacgccgggacggccttcattcagactcagcagctgcacgcagccatggccgacacattcctggagcacatgtgccgcctggacatcgactcaccgcccattacggcccgaaacaccggcatcatctgtaccatcggcccagcttcacgagcagtggagacattgaaggagatgattaagtctggaatgaatgtggctcgtttgaacttctctcatggaacccacgagtaccacgcagagaccatcaagaatgtacgtgaagccacggagagctttgcttcagaccccattctctatcggccagtggcagtggccctggacactaaa

SEQ ID NO: 14561 - DNA, 221 bp, Bos taurus
  Clone ID: 62-LIB3058-051-Q1-K1-H6
gttctagatcgcgagcggccgccctttttttttttctttttttttgcattcatgtctttattagtttggatgatcagtacactgcttttatttcaagtgcagtcattcactcctgcgagttctaggacttgttaatcccacccttacattggaaatacatcagagacattttttaccttaagaagcatgccaagataaaagtagtaaaatgaaaaataaat

SEQ ID NO: 14562 - DNA, 402 bp, Bos taurus
  Clone ID: 62-LIB3058-053-Q1-K1-H6
cgagagcgcggcggaggccattcaggctgtgcgcgacaacaagctgcacgctttcatctgggactcggcggtgctggagttcgaggcctcgcagaaatgcgacctggtgaccacgggcgagctcttcttccgctcgggctttggcatcggcatgcgcaaggacagcccctggaagcagaacgtctccctgtccatcctcaagtcccacgagaacggcttcatggaagacctggacaagacgtgggttcggtaccaggagtgcgattcgcgcagcaacgcccctgctaccctcaccttcgagaatatggcaggggtcttcatgctggtggctgggggcatcgtggccgggatcttcctgatcttcatcgagatcgcctataaacggcacagggacgctcggcg

SEQ ID NO: 14563 - DNA, 320 bp, Bos taurus
  Clone ID: 62-LIB3058-054-Q1-K1-H6
tatggagataactcaccaagtaaccttaaagacgacctactgacggctggtgctgctgtctatgctagacctggccggccccagcggtccccagcaccttggtactgctggacaacctcaacctccgggagacgcattcgcttttcttccggagcctgaaggatcgcggctttgtactcacattcaagaccgcagatgaccccagcctgtccctcattaagtacggggagtttctttatgacaatctcatcattttctccccttcggtagaagattttggaggaaatatcaacgtggagaccatcagtgcctttatcgac

SEQ ID NO: 14564 - DNA, 416 bp, Bos taurus
  Clone ID: 62-LIB3058-056-Q1-K1-H10
ctgatggaggcggacgtcaatgaggagggcgtgcaggaggcgctgtcctttgcggtcagcgagttcaacaagcggagcaacgacgcttaccagagccgcgtggtgcgcgtggtgcgcgcccgcaagcaggtcgtgtcagggatgaactatttcttggacgtggagcttggccggactacatgtaccaagtcccaggccaacttagacagctgtcccttccataaccagccgcacctgaagagggaaaagctgtgctccttccaggtttacgtcgtcccatggatgaacaccatcaacctggtgaagtttagctgccaggattaacaggcaggccactgaccgcctctcactcacgctcctgcagagtgcccacacttgtggtgggtgactgcctactggccgtgccttccccatgc

SEQ ID NO: 14565 - DNA, 455 bp, Bos taurus
  Clone ID: 62-LIB3058-058-Q1-K1-H6
gtctcctgtgaaagaggaggccaagtccccatagaaggccaagtctcctgtgaaagaggaggccaagtccccagagaaggccaagtccccagtagaggccaagtccccagagaaggccaagtctcctgcgaaggaggaggccaagtcgccagagaaggccaagtctcctgtgaaagaggaagccaagtccccagaaaaggccaagtctcctgtgaaagaggaggccaagtccccagagaaggccaagtctcctgcgaatgatgaggccaagtccccaaatccccagagaaggccaagtctcctgtgaaggatgaggccaaggctcctgggaaggaggtcctaaagaaggaggaggccaagtcccctgtgaaggaggaagaaaaaccccaggatgtgagagccaaagagcccccaaagaaggcagaggaagagaaagcttcagccatacccaaagc

SEQ ID NO: 14566 - DNA, 299 bp, Bos taurus
  Clone ID: 62-LIB34-001-Q1-E1-H6
aaataattgttggcgttaacaaaatggattccactgagccaccctatagccagaagaaatacgaagaaattgttaaggaagtcagcacctatattaagaaaattggctacaaccccgaacaattacaattggtgcaaattccggcctgaaatggtgacaccatcctaaaaccaattgcaaaaatgccatggttcaggggatggaaattcacccgtagggacggcaatgccattggaaccaccctgcttgaagctctggattgcattctgccaccaactcgcccaagtgacaaacccttg

SEQ ID NO: 14567 - DNA, 393 bp, Bos taurus
  Clone ID: 62-LIB34-004-Q1-E1-H10
cgagaggtataaagagctcatcgtcatgacaggaaagtttctgtggtttgaagggatacccttcccaagtgtggattactcacctgaactcctgagagaggtacaggagagttttcttattaaagatgaagatgtcttactgctgactttccccaaatcaggaacgaactggttgattgaaactgtctgcctgatttactccaagggggatcccaagtgggtccaatctgagcccatttgggaccgctccccctgcgtagagactaagcatgggtatgaattactaaaggagaaggaaggcccacgtctcatcagttctcaactccccatccaactcttccccaagtcgttcttcaaatcgaaggccaatgtgatctagcttgtccgaaatcc

SEQ ID NO: 14568 - DNA, 406 bp, Bos taurus
  Clone ID: 62-LIB34-004-Q1-E1-H6
ggggatgtggcctttgtcaagcactcaacggtattcgacaacctgcctaacccagaagacaggaaaaactatgagctgctctgcggggacaacacccggaagtctgtagataattaccaagaatgctacttggcaatggttccttcccatgcggttgtggctcgaactgtgggcggcaaggaggatgtgatctgggaacttctcaatcacgcccaggaacattttggcaaagataaaccagacaatttccagcttttccaatcccctcatgggaaggacctgctgtttaaggactctgctgatgggtttttaaagattccttctaagatggattttgagctgtacttgggatatgaatatgtcactgctcttcagaatctaagagaaagtaaaccccggactcctc

SEQ ID NO: 14569 - DNA, 320 bp, Bos taurus
  Clone ID: 62-LIB34-005-Q1-E1-H10
tgcagggagacaggaagctccagggctcccaactgcagataccgggccaaggccagcaccagacgtgttgtcattgcctgtgaaggtaacccggaagtgcctgtgcactttgacaagtagataccactcaacaggggttatggcccaacagctggcccttaacttactccttaaatagtaatgagtaagcatttgagctgtcccaggccgactcccctgattctttgtttttttcttctttaaataacccattctgttaaacacattgcatgacagagaaagatgagacacaaacttataatgaatctgggctcttctgt

SEQ ID NO: 14570 - DNA, 413 bp, Bos taurus
  Clone ID: 62-LIB34-005-Q1-E1-H6
catctatgttctggattatctaaatgagacacagcagctgactgcagagctcaagtccaaggctatcctctacctcaacactggttaccagagacagctgctctacaagcacttcgatggctcttacagcacctttggggagcatcgtggcaacagtgagggcaatacttggctcacggcctttgtactgaagagttttgcccaggctcgaggctatatcttcattgatgaagcacatattactgaagctctcacctggctggcccaaaagcaaaagagcaatggctgtttcaggagtactgggactctgcttaacaatgccatcaagggtggggtggacgatgaagtgaccctctctgcctacatcaccatcgcccttctagagatgcctctccctgttacacaccctgtcg

SEQ ID NO: 14571 - DNA, 410 bp, Bos taurus
  Clone ID: 62-LIB34-006-Q1-E1-H6
ctatgaaggaatcgacttctatacctctattacccgtgcccgatttgaagaattgaatgctgacttgttccgtggcaccctggaccctgtggagaaagcccttagggatgccaaactggacaagtctcagattcatgatattgtcttggttggtggctcaacccgtatccccaagattcagaaacttctccaggacttcttcaacgggaaagaactgaataagagcatcaaccctgatgaggctgttgcatatggtgcagctgtccaggcagccattttgtctggagacaaatctgaaaatgttcaagacttgctgctgttggatgtcactcctctttcccttggaattgaaactgctggtggagtcatgactgtcctcatcaagcgcaatactaccattcctaccaagc

SEQ ID NO: 14572 - DNA, 382 bp, Bos taurus
  Clone ID: 62-LIB34-007-Q1-E1-H10
gtggaagcaagctggcatcgatcggcctttcactctcgatgatgtgcagtatatgatttttcacacgcctttctgcaagttagtccagaaatccctggcccgcctgatgttcaatgacttcctgttggccagtggtgacacacagactggcatctacaagggcttggaggccttcaggggattaaagctggaagacacctacaccaataaggatgtagataaagcatttctaaaagcctctctgaacatgttcaataagaaaaccaagaactccctctacctctccacgtacaacgggaatatgtacacctcatccctatatggatgcctggcctcacttctggcccatcactctgcccaagacttggctggctccaggatc

SEQ ID NO: 14573 - DNA, 403 bp, Bos taurus
  Clone ID: 62-LIB34-009-Q1-E1-H6
agcaccggcatcttccacttctggagcgacagccagaacaacctctccgtgacccgcgtgcccctgagcgccaacacctacctgctgctcatccagccgcaccagagccccgacctgcggaaggtggaggccctcaccttccagcacaacttcctgacccgaatgaagaacctctctcctcgggccatccacctgaccatgccccagctgacactgaaagcgtcctatgacctgcaggacctgcttgcccaggccaagctgcctaccctgctgggcgccgaggcaaacctgagcaaagtcagcgatgccaaccttagagttgggaaagtgctgaacagcgttctttttggactaaaagcagatggagagcatggcgcagagtccgtcccacagccggccgggc

SEQ ID NO: 14574 - DNA, 399 bp, Bos taurus
  Clone ID: 62-LIB34-010-Q1-E1-H10
cacaacacccaagactgagtcgtattaggcgagcggccgccctttttttttttttttttttttttttttttttttttttttatttttttttttttcttttttgagcgataaacactggggattttattctggaaaacatcaaaactgtccacaagtcacacatcatgaacatttacttcctaccacgcaacttcaacaatattcaattcaaacccattcttgtttcatcattgccctcacaccttcaaagccagcgtggattaatttgaagtaaatccaggacacatcactttatcataaacactccattttccttttggctgcaagttgcaccctatgaaatcttaggtcccacttacggatcaaacctgggccccaaaccactgggtcctaaccaaa

SEQ ID NO: 14575 - DNA, 422 bp, Bos taurus
  Clone ID: 62-LIB34-010-Q1-E2-H6
ggagtgggacgcccattgaagcctggtcgtctagaaggtcccttgaagcctgtggggtcccgaggtcagggtccatgccatccgaccttaaaatcggtccgagcgcgcactctgttctctggaacgccatgatccatccactccgtaacatgacactgaagggggtgatatggtaccagggggagtccaatgtaaactttaacagggacctgtacaattgtacattccctctgctcattgacgactggcgccagaccttccacgatggctcccaggggcagacagagcgcctcttcccattcggatttgtccagttatcttcctatttgtctggtgaagccctgcatgatggacttccccagattcgttggcatcagacagccgactttggctacgtccccaaacaaaggatgcccaaacac

SEQ ID NO: 14576 - DNA, 400 bp, Bos taurus
  Clone ID: 62-LIB34-011-Q1-E1-H6
cccacgcgtccgactgacgctcctgtttggccatagccacagcgtcatgcaggggaggacctgggggctgcgtctgctgctcctgctggggttgaggctggggtcccaggaggccctgcccccaccctgtggaagccagatttactgccatggggagctcctgcggcaagttcagatggccaaactctaccaggatgataagcagtttgtggacatgccactgtcctcagctccagaccaagtcctgaggcacttccgcgagctggcccagacccacaacctcagcatcccccggcaggagctgcaaatgttcgtccaagaacactttcgggctgtggggcaggagctgcagccctggacccccgaggactggagagacagcccccagtttctgcagaag

SEQ ID NO: 14577 - DNA, 386 bp, Bos taurus
  Clone ID: 62-LIB34-012-Q1-E1-H10
cgctgattattctcaatcaaccataaagatattggaacactttgatcacaatctgcagcttgggcaggtatactaagtggatctctaggccttctattgcgttcggacatatgccaaaccggatctctgttctgagacgactaaatccattccgtacctgtaatcgcacaagctcttgtaatattcttcttcaaaacagtagcaatcagaactgaacgattctgtatctgacatgttccccaagtaattggtgctccacgatatagcatttcccagattacctatgatatgcttctgacacctccctctctcagtcctactattcctcgcatcctctatagttgacgctggggcatgaacagggtgaaccgtgtccacttcatagc

SEQ ID NO: 14578 - DNA, 425 bp, Bos taurus
  Clone ID: 62-LIB34-012-Q1-E1-H6
aagtgaaacaggtaatggatcccaaaggccagagagtgaagcttaatgatggccacttcattcctgtcctgggatttggcactgctgaagctaaagaggttcctaagagtgaagctctggaagtcaccaaatttgctatagaggttgggttccgccatattgactgtgctcatgtgtaccaaaatgaagagcacgttggccaggccattcgaagcaagattgtagatggcactgtgaagagagaagacatattctacacttcaaagctttggtgcactttccttcgaccagagttggtcagaccagccttggaaaagtcactgaaaaatcttcacctggactatgttgatctctatattattcattttccactggctatgaagccaggggaggaattattgccaaaagatgaaaatggaaaactg

SEQ ID NO: 14579 - DNA, 402 bp, Bos taurus
  Clone ID: 62-LIB34-014-Q1-E1-H6
aatccgcagaggctgaagctagttaacatcattgtcttggatcccaactggctcccaattcctggtgaaactcctaaagggagactgttaaatcatgaaattaatcaccatccttttcctttgttccaggctgctaccaagtttaacccaagagtcttcacaagaaatcgactgcaacaaccaggatgtatttaaagctgtggacgctgctctgacaaaatacaacagtgaaaacaagagtggcaaccagtttgtattgtaccgcataaccgaggttgccagaatggataatcctgacacattttattccttgaagtaccaaatcaaggagggcgactgtccttttcaaagtaacaaaacttggcacgactgtgactacaaggactctgcacaagctgccac

SEQ ID NO: 14580 - DNA, 396 bp, Bos taurus
  Clone ID: 62-LIB34-015-Q1-E1-H6
gtccgctacaattaatagaagaagcaaaatatttaaagaaatttcccaaggctgagtttgtagaagttaccaagctagtgacagatctcacaaaagtccacaaggaatgctgccatggtgacctacttgaatgcgcagatgacagggcagatcttgccaagtacatatgtgataatcaagatacaatctccagtaaactgaaggaatgctgtgataagcctttgttggaaaaatcccactgcattgctgaggtagaaaaagatgccatacctgaaaacctgcccccattaactgctgactttgctgaagataacgatgtttgcaaaaactatcaggaagcaaaagatgccttcctgggctcgtttttgtatgaatattcaagaaggcatcctgaat

SEQ ID NO: 14581 - DNA, 401 bp, Bos taurus
  Clone ID: 62-LIB34-016-Q1-E1-H6
cctacttttatgcaccagaactcctttactatgctaataaatataatggagtttttcaagaatgctgccaagctgaagataaaggtgcctgcctgctaccaaagattgaaactatgagagaaaaagtactgacttcatctgccagacagagactcacgtgtgccagtattcaaaaatttggagaaagagctttaaaagcatggtcagtagctcgcctgagccagaaatttcccaaggctgagtttgtagaagttaccaagctagtgacagatctcacaaaagtccacaaggaatgctgccatggtgacctacttgaatgcgcagatgacagggcagatcttgccaagtacatatgtgataatcaagatacaatctccagtaaactgaacgaatgctgtgat

SEQ ID NO: 14582 - DNA, 200 bp, Bos taurus
  Clone ID: 62-LIB34-017-Q1-E1-H10
gttctagatcgcgagcggccgcccttgttgctctgaaaaaaaaaaaaaaaaaaaaaagaaaaaaaaaaaaaaaaaaaaaaaaaaaaaaaaaaaaaaaaataaaaaaaaaaaaaaaaaaaaataaaaaaaaaagggggagccgcccaaaaggatcaaaccttacatacccttgaaaacaagttcaaacccctacaaaaatt

SEQ ID NO: 14583 - DNA, 411 bp, Bos taurus
  Clone ID: 62-LIB34-019-Q1-E1-H10
gccaagaagccaagtcagtgggcttgatcagccatgttctagaacagaaccaggagggggacgctgcctacagaaaggccttggacctagcaagagagtttttacctcagggacctgttgcaatgagagtggcaaaattagcaattaatcaaggaatggaggttgatttagtaacaggattagccatagaagaagcatgttatgctcagaccattccaacaaaagacagacttgaaggtcttcttgcttttaaagagaaaaggacccctcgctataaaggagaatagaagaaacagaaatctttaaaatgccaatgtaataaataatactcctggaagtacctttcagattcacatatgcctcagcacctggaattgcagtgaccaaagtgaagaacgagttatctgtgta

SEQ ID NO: 14584 - DNA, 414 bp, Bos taurus
  unsure (368): unsure at all n locations; Clone ID: 62-LIB34-019-Q1-E1-H6
agtgagagtgccctgctggcctggtcctgggtgccggcgtggtgaggaacccagcgctcgaagaggcagccatggggctgctgtctggggacacgctggggcccctggccgtggccctgctcatcttcttgctcttgctggacctgatgcaccggcgctcacgttgggccccacgatacccaccaggccccatgccgctgccggtgctgggcaatctgctgcaggtggacttcgaggacccacgtcccagctttaaccagttgcggcgccgtttcgggaacgtgttcagcctgcagcaggtctggacaccggtagtcgtgctcaacgggctggcggctgtgcgcgaggcgctggtgtaccgcagtcangacactgccgaccgtccaactcaggcactctacaagcacttgggtt

SEQ ID NO: 14585 - DNA, 334 bp, Bos taurus
  Clone ID: 62-LIB34-020-Q1-E2-H6
gtcgacccaaacgtccgagagtgcgagacccactgcagcctggacgtccacactgtcgcgtgacactagtcaggtccctgggtaaagatctatgccatcagaccttataggctcgtctgagcgctcaagttcattctgctgaattccatgatgtatccactccattgcatgatactgaagggggtgatatggtaccatggcgagtccagtgtcgtctttgcccaggacatgtggaattttacattcgctctgctcattgacgactggatccagaccgttacatgattgatcgaatggtcagacagaccgctgcttcccattcggcattgtcgag

SEQ ID NO: 14586 - DNA, 447 bp, Bos taurus
  Clone ID: 62-LIB34-022-Q1-E1-H10
cagaactcctttactatgctaataaatataatggagtttttcaagaatgctgccaagctgaagataaaggtgcctgcctgctaccaaagattgaaactatgagagaaaaagtactgacttcatctgccagacagagactcaggtgtgccagtattcaaaaatttggagaaagagctttaaaagcatggtcagtagctcgcctgagccagaaatttcccaaggctgagtttgtagaagttaccaagctagtgacagatctcacaaaagtccacaaggaatgctgccatggtgacctacttgaatgcgcagatgacagggcagatcttgccaagtacatatgtgataatcaagatacaatctccagtaaactgaaggaatgctgtgataagcctttgttggaaaaatcccactgcattgctgaggtagaaaaagatgccatacctgaaa

SEQ ID NO: 14587 - DNA, 408 bp, Bos taurus
  unsure (348),(379): unsure at all n locations; Clone ID: 62-LIB34-022-Q1-E1-H6
ggtccccatgatgcagaccaagggcgcgttcctggcggccagcgaccaggagctggactgcgacgtgctgcggctggagtacgtggggggcatcagcatgctggtggtggtcccacacaagctgtccgggatgaagaccctggagagccagctgacaccccaggcggtggagcggtggcagaggagcatgacaaacaggacgcgggaagtgctcctgcccaagttcaagctggaaaaggactacgacctggtgggcgccctgcgggccctgggggtcacggcgctcttcgacaagcacagcaacaccacggggatcacgggccagaggatcgtcattgacctgttcanacaccagggcaccatcacggtgaacgagganggcacacaggccgcagccgtgaccgccgt

SEQ ID NO: 14588 - DNA, 366 bp, Bos taurus
  Clone ID: 62-LIB34-023-Q1-E1-H6
aaggagcattgttccagtagatatttccaacaggaagtgtatctctaagcctagcttcccaccttttggcagtaccagctatcagttcatcatggcttggaaaaaaaatgctgggatgggagtatgaaatcgggcttctgtcccagctgtgtgactttgggtaatactatccctctctggacttcagtttccccatgtcaggtgagggactgaagaatccttgaaatcatataaaaaggctagaatgttccccaccaatcactgttgatttcaatgcatttaagtgccactcatcttttaagaaaagcaggtggacagccgggtagacatggccaacccgggattggtactgtcctgtgggttaag

SEQ ID NO: 14589 - DNA, 372 bp, Bos taurus
  Clone ID: 62-LIB34-024-Q1-E1-H6
atcctgctgacctccagcacctgcctctacagtaggtacatatggcattgtcccagctcagtcgcttctcagccatggagcttctcctggcctctgccatcttctggctggtattctgggtggtcacgacctggcggcctcgggtcgctcaaggcctgaagagtccaccggatccctggggctggcctctgcttgggcacatgcggacgttggggaagaacccgcacgtggtcctgtcgcagctgagccagcgctatggggacgtgctgcagatgggcactggctgcagagccgtgcctggtggtcgagctgcctggataccgtcggggcaggcccccgtgcggcaggggcgatggatttcagggggcgggc

SEQ ID NO: 14590 - DNA, 403 bp, Bos taurus
  Clone ID: 62-LIB34-026-Q1-E1-H6
aggtggacatcttccgacttctcttctggggcggttcctatggtggtgctggacagccccagctcatcagccgcaactggtttggtctgccgggacgactggatgcggccatggccggccacatctatgtctcaggctcagctcccagcttcccccgggccaagatgactaagtctgcacgccgccatcgcaaacgctaccgctcgctccgaagccgtggtcgaggccgcggccgaaaccagaacccctaccggcgatctcgatctgccttcctgtcctggctctccagcgaggagctgggcctgggagccaacaactatgatagcttcgagatggactggcttgtgcctgccacctgtgagcccatccagagtgtctacttcgtctcagaagacaagtacta

SEQ ID NO: 14591 - DNA, 420 bp, Bos taurus
  Clone ID: 62-LIB34-027-Q1-E1-H6
acgaagacgcgtgggttttttttttttttttttttttaaagtcctttaaatcaacaatctctttttaattcaattttgttttgctagccatagattggcattagctgtgggggaaagaagatcctgggtaactcactgctgagtctcctcattagggaataacaaatgggaacatcatgggaattgaaggagaaaaagaagcattgtggatttaagagagagacttcagaggttggtaggattttcatgaagcatgttgcttttcatttggcagcaagaactatctctggaaggtgctggtgtctttctttccatatgatcccaaggaaaccagcacctctactttttttttcaactgcaatcctttataaaattttcgaattttttagttcacaaggaactcccttgaactcttttggg

SEQ ID NO: 14592 - DNA, 423 bp, Bos taurus
  Clone ID: 62-LIB34-028-Q1-E1-H6
aaagcactggggcagagagagcagagcccagaggagacagaggctgaagctagttaacatcagtgtcttggctcccaactggctcccaattcctggtgaaactcctaaagggagactgttaaatcatgaaattaatcaccatccttttcctttgttccaggctgctaccaagtttaacccaagagtcttctcaagaaatcgactgcaacaaccaggatgtatttaaagctgtggacgctgctctgacaaaatacaacagtgaaaacaagagtggcaaccagtttgtattgtaccgcataaccgaggttgccagaatggataatcctgacacattttattccttgaagtaccagatcaaggatggcgactgtccttttcaaagtaacagaacttggcaggactgtgactacaaggactctgcac

SEQ ID NO: 14593 - DNA, 383 bp, Bos taurus
  Clone ID: 62-LIB34-030-Q1-E1-H6
ctctcattaaatgtccttacaacaattctaagatgtacgtattatgaccctatattacagacagcattttgttgttcagttgctcagttgtgtccaactccatggggtcacaaagaatcagacacgactgagtgactgaactgaactgataaagttcagttattggtggtataatggtgaacatagctgccttccaagcagctgacctgggtttgattcccaaccaacacaaccttcacttttgggcttcctttgtgactcagagactaaagaatctgcctgcaatgcaggagacctgggtttgatccctgggttaggaagatccccagagaacggaatggcaactcactccagtattctggcctggagaatctcatggacag

SEQ ID NO: 14594 - DNA, 393 bp, Bos taurus
  Clone ID: 62-LIB34-031-Q1-E1-H6
ggaccatgtctgcttgggcagccctcctgctgctctggggtctgtccctgagcccagtgactgaccaggcgacgttctttgaccccaggccatccctgtgggccgaggccggctcaccgctggcaccctgggccgatgtgacgctgacctgccagagcccgctgccgacccacgagtttcagctcctcaaggatggcgtgggccaggaaccggtgcacctggagtcccctgcccatgagcacaggttcccgctgggaccagtgaccagcaccacccggggcctctaccgctgcagctacaagggcaacaacgattggatcagcccgagcaacctggtggaactgaccggagcagagcccctggccgcacgctcgatctcaaccagtcccgtgt

SEQ ID NO: 14595 - DNA, 416 bp, Bos taurus
  Clone ID: 62-LIB34-032-Q1-E1-H10
gattgttctctggcagccagtagcagctgaatatattgtgaagggatacgaagtccatttttttgtgaatgcatctgatgtaagcaatgtgaaagcccatttaaatgcgagcagaattccattcagggtcctggtggaaaatgtggaagatcttatccggcagcagacttccaatgacaccatcagcccccgggcatcctcctcctactatgaacagtatcactcactaaatgagatctattcttggatagaagttatgactgagcggtatcctgatatggttgaaaaaatccacattggatcctcatacgagaagtacccactttatgttttaaaggtttctaaaaaagaacaaagggccaaaaatgccatgtggattgactgtggaatccacgccagagagtggatctctcctg

SEQ ID NO: 14596 - DNA, 431 bp, Bos taurus
  Clone ID: 62-LIB34-034-Q1-E1-H10
atttcttgcaacttcgaaaaatttaaaaccatgaaacatctattactgctacttttctgtgcttttatagttcaggcccaatttcctactgactatgacgagggacaagatgacagacctaaggtaggtttgggtgcccgcggtcatcggccctatgacaagaagaaggaagaggcccccagcctgagacctgtgccccctcccatcagcggaggtggctatcgggctcgtcccgccacagcaactgtgggccagaagaaagtggagagaaagccccctgacgctgatggctgcctgcacgcggacccggatctgggtgtgttgtgtcctacaggatgtaagttgcaagatactttggtaagacaggagagaccaatccgaaagagtatagaagatttacgtaatactgtggactctgtttcccggacctc

SEQ ID NO: 14597 - DNA, 172 bp, Bos taurus
  Clone ID: 62-LIB34-036-Q1-E1-H6
agagcttgatcctgaaccggttgtgcgtgctgcatgagaagacaccagtgagtgaaaaagtcaccaagtgctgcacagagtcattggtgaacagacgggcatgtttctctgctctgacacctgatgaagcatatgtacccaaagcctttgttgaaaaatggttaaccttcaa

SEQ ID NO: 14598 - DNA, 358 bp, Bos taurus
  Clone ID: 62-LIB34-037-Q1-E1-H10
gttctagatcgcgagcggccgcccttttttttttttttttttttttttttttttttttttttttttttttttttttttttttttttttttttttttttttctggcttcagtttagcaatttgtttgcgattgtgccggccgttggtattagcactaggatgaggagaaagtataggacagatgctagttgtccgatggggataaaggggtgttcgacaggttgtcctccaattcatgtgagtgtcagtaggtcggctagcagggctcataacaggcattggctgagtagccggaagattaaccttcgttgtttgggggtgtgtagtagggggattagagcaggaattaggatagagaa

SEQ ID NO: 14599 - DNA, 424 bp, Bos taurus
  Clone ID: 62-LIB34-037-Q1-E1-H6
gatgagcgctcgcaagaggacggcagaggcccggcggctcgcagctccgggaccttgtggcgcatcaggacgcggctgccctgctgcccggaccccgagccgccgccgccgccacagccgctctgctttctgcgcgttagcctcctctgcgcgctccggcccggaggctgcgggagccgttggggcgaggacggcgcgcggctgctgctgctgcccccgacccgggcggctggaagcggagaggccgagccgagcggctgcgccccctatgccaggaggatgttggagagcagcggctgcaaggcgctgaaggagggggtgttggagaagcgcagcgacgggctgcttcaactctggaagaaaaagtgctggatcctcaccgaggaagggctgctgctcatcccggccaaacagctggaacatc

SEQ ID NO: 14600 - DNA, 374 bp, Bos taurus
  Clone ID: 62-LIB34-038-Q1-E1-H10
actcactaaagaggagatcttagacaactggaacatgtttgttggaagccaagctaccaattatggggaagacctcaccaaaaaccacgatgagctctgatgcaaactcaccataacatgacagactgttttgttttattgtcctggatggttgctacaattgtctcacttacagcagttatgtctccacagaaagcaaatttatcacctcagattggggttaaaattgttttttactcaatatttgctggaaaatactcaccactattctttgagtaacatttctcttcaagcacattaaaatcttggtaaattgcagtgctctatggggataccttactaaaacatgactttttagcttttttccatgaaat

SEQ ID NO: 14601 - DNA, 433 bp, Bos taurus
  unsure (419): unsure at all n locations; Clone ID: 62-LIB34-039-Q1-E1-H6
gaattcttgtgtcttatttctcattctctcgccgtattgcgctttcagaaaccctgcttgtcaagcgtgtctcgacaagtggtgccgaaatagggacccgaaagtaaatccagcctgagaagctagttcctagccgaggtgaacgtagggaaatctggccagctaggcggaagaggaaagtacttggctctggctcaattttttctgcgctgaggcataaggaacctgagctatttggaacccctggaaagccatctagtggtgtccaacctgataccatctgcctgggagcatacaaaccagtcaactttcagtttctttcaggccaagagcatcatgcacccttgggtagccatcctgggcctcctactccttctgacagatggtgtaacctcttattctcaagtgactggaagaancggtgagtctgtca

SEQ ID NO: 14602 - DNA, 414 bp, Bos taurus
  Clone ID: 62-LIB34-040-Q1-E1-H6
cagagcgatcctctacaactaccgggaggcggaaaatctcaaggtgagggtggaattgctctacaatccagccttctgtagcctggccaccgccaagaagcgccaccagcagactataacaatcccagctaggtcctcggtggcggtgccttacgtcattgtgcccctgaagatcggcctccacgaggtggaggtcaaggctgccgtctacaaccacttcatcagtgatggtgtcaagaagaccctgaaggtcgtgccagaaggcgtaagagtcaataaaactgtggctgttcgtacactgaatccagaacatctgggtcaagggggagtgcaacgagatgaagtcccagctgcagatcttagtgatcaagtcccagacaccgagtcagagaccaagatcctcgtgcaggggac

SEQ ID NO: 14603 - DNA, 273 bp, Bos taurus
  Clone ID: 62-LIB34-041-Q1-E1-H6
cgcgggtcgacgcacgcgtacaagaacatgcggtttttaacacgggagtttgtgtggaacggtcatacctgagctcggcagttgatctcagagaggtgtaacgatgcccccagtcccgtggatactgcattccgctatgatcgtaacagtctccttccgatcaagggggacaaattctgggtatacccacctgacaagggggaggaatatccacgcttgctccaggtacaagtttcctgtaatcccactcccacttcatgcagctttcgaatg

SEQ ID NO: 14604 - DNA, 232 bp, Bos taurus
  Clone ID: 62-LIB34-042-Q1-E1-H10
cttgacggcagttggtacatggaagtgcgggaccaggacgatcgctggatacggatcgccatgtagagaggggacagtatgaccctggccgccggtatctattaccgctgcacgctggaacagagaatctacgtgaaggccatgcggctgttcgtgggagaacccgtgtggactccatataattggccgtcggtgcacctctaggctcggactcaagagctgtagttccatg

SEQ ID NO: 14605 - DNA, 355 bp, Bos taurus
  Clone ID: 62-LIB34-042-Q1-E1-H6
acacaaatgatatttatgatgctgccttgaagctcattaatgaaattgaggagatgggtggaatggccaaagctgtagcagagggaatacctaagcttcgaattgaagaatgtgctgcccgaagacaagctagagtagattctggttctgaagtaattgttggagtaaagaagtaccagttggcaaaagaaaaatctgtggatgttttggcaattgataatacttcagtgcgtaataagcagattgagaaacttaagaaggtcaaatccagtagggatcaggctttggctgaaccgtgtctggatgctctgactggatgtgctgccagtggagatgggaatattctcgctcttgc

SEQ ID NO: 14606 - DNA, 419 bp, Bos taurus
  Clone ID: 62-LIB34-043-Q1-E1-H6
atccatgagaacaaaacatcagaagccagagagctggtcaaagcaatccaaatcagctataaccctgatcaaccatcaaagccaaataacatagagagtgctaccaagaattccaagagtatgatggaagaaattatgaaatatgaaacactgataacaacacatgaatcaacaattcgatttttgcaagaaatatataactcaaatagtcaaaagatcgttaacctaagagataaagtggtccagcttgaagcaaactgtcaagagccttgtcaagatacagtgaaaatacatgatgttactgggagagattgccaagatgttgccaataaaggggccaaagagagtggactttaatttatcagacctctgaaagctaagcagcagttcttagtctactgtgaaattgatgggtcggg

SEQ ID NO: 14607 - DNA, 366 bp, Bos taurus
  Clone ID: 62-LIB34-044-Q1-E1-H6
aaatgtgaacaataagaaaaagctaactgctttcaaacataggcagtacctttcatatactatttacaatcattgtcatcatatcaaaaaaatgcctgcaaggcagttatgaaatttggaccataaatcttacaatcgataaacattgctatacttagtcaaaaattccccaagattggatttaagcaacttagctcccttctagaatatgtttcctcaaaatatgagcgatgctgtgaaggggaagttgagcagtgcatccatggtatgatcaaggttatcatccatatttgttcataacaagattccagcgctaacagaatcaaagactgctgtcaaaaaaaaatacgatagcgtggggagtgt

SEQ ID NO: 14608 - DNA, 400 bp, Bos taurus
  Clone ID: 62-LIB34-045-Q1-E1-H6
attttatttctcttctccttctcttcagctctgcttattccaggggtgtgtttcgtcgagatacacacaagagtgagattgctcatcggtttaaagatttgggagaagaacattttaaaggcctggtactgattgccttttctcagtatctccagcagtgtccatttgatgagcatgtaaaattagtgaacgaactaactgagtttgcaaaaacatgtgttgctgatgagtcccatgccggctgtgaaaagtcacttcacactctctttggagatgaattgtgtaaagttgcatcccttcgtgaaacctatggtgacatggctgactgctgtgagaaacaagagcctgaaagaaatgaatgcttcctgagcaacaaagatgataacccagacctccccaa

SEQ ID NO: 14609 - DNA, 338 bp, Bos taurus
  Clone ID: 62-LIB34-046-Q1-E1-H6
gggtcgacccacgcaaccgaagataacaacacatgaatcaacaattcgatttttgcaagaaatatataactcaaatagtcaaaaaatcgttaacctaagagataaagtggtccagcttgaagcaaagtgtcaagagccttgtcaagatacagtgaaaatacatgatgtaactgggagagattgccaagatgttgccaataagggggccaaagagagtgggctttacgttatcagacctctgaaagctaagcagcagttcttaggctactgtgaaattgatgggtctggaaatggatggactgtgtttcagaagaggcttgatggcagtctggatttca

SEQ ID NO: 14610 - DNA, 440 bp, Bos taurus
  Clone ID: 62-LIB34-047-Q1-E1-H6
atggactcctgctcctgctgaagcacccagaggtcacagctaaagttcaggaagaaattgatcgtgtggttggcagaaaccgaagcccctgcatgcaggacaagagctgcatgccctacacagatgctgtgctgcatgagatccagagatacattgaccttgtccccagcagtatgccccatgcagcaactcaggatgttaagttcagagaatacctcattcccaagggcacagtcatattaacatctctgacttctgttctgcatgatgataacgagttttccaacccagggcagtttgatcctggtcacttcctggatgaaagtggcaactttaagaagactgaccacttcatggctttttcagcaggaaaaagagtttgtgttggagaaggcctggcccgcatggagctgtttttactcctggtcagcaatttacag

SEQ ID NO: 14611 - DNA, 105 bp, Bos taurus
  Clone ID: 62-LIB34-048-Q1-E1-H10
atgtccccaaacttgtgactgatttcatggctaagaagttttcactggatcagttaattacccatgttttaccacttgaaaaaataaacgaaggatttgacctgc

SEQ ID NO: 14612 - DNA, 432 bp, Bos taurus
  Clone ID: 62-LIB34-048-Q1-E1-H6
gtggtgcctgaacatgatcatggcagaatcaccgggcctcgtcaccatctgccttttaggatatctactcagtgctgaatgtacagtttttcttgaccgtgaaaatgccaccaaaattctccatcggccaaagaggtacaattcaggtaaattggaagagtttgttcgagggaaccttgagagagaatgtaaagaagaaaaatgtagttttgaagaagcacgagaagtttttgaaaacactgagaaaactactgaattttggaagcaatatgttgatggagatcagtgtgaatccaatccatgtttaaatggcggcatgtgcaaggatgacattaattcctatgaatgttggtgtcaagctggatttgaaggaacgaactgtgaattagatgcaacatgcagcattaagaatggcagatgcaagcagttttg

SEQ ID NO: 14613 - DNA, 415 bp, Bos taurus
  Clone ID: 62-LIB34-049-Q1-E1-H10
cagtttttacaaatcatcttgtctgtatttccagtcactgtttaatctgtacttcctaggccagacttgattttatctgacttactaagattatttccctttgataaaacaagtgtttgtcaggatgccctaaaactcactcattagtactcccttttgaagtacgttctataaaaaaaaaccataaacagattatttcaggcttgagatttgtaatgacaccttatagtgctgacgtgcattaagggcactacccaattatgcttttttttttttttaaaggataattgcttttcagaattttgtggttttctgtcatacatcaacaagaactagccataggtacaaccatgtctcctccctcccggatacacctcccaattatgttttaatgaaagaaagagaaactttggta

SEQ ID NO: 14614 - DNA, 429 bp, Bos taurus
  unsure (329),(393): unsure at all n locations; Clone ID: 62-LIB34-049-Q1-E1-H6
tatacttgtagctctaaatgtggtgacactttccgttcttctggcagtgagaagcagagagacagacttacaagttgtgtatgtcacctgcccaaaaggatggattggatttgggaataagtgtttttatttttctgaagactcagagaattggacattgagtcagatatcctgtacttcagtgggagctgttcttgctcagtttgaaactgaggaggagctgaactttctgacaagatacaaagacatttttgactattggattggccttagcagagaatcatcacatcatgcttgggagtggacagacaactctaaacttaatgtcncatttgtcatccaaggaactggagaatgtgcctacctgactgactctggagttagtagtggcangagatacgtaaattagaaaaagatttgcagcaagac

SEQ ID NO: 14615 - DNA, 442 bp, Bos taurus
  Clone ID: 62-LIB34-050-Q1-E1-H6
gcgtccgaattatttctgcattaatttgaatatagataggaaaacacgaagaaccaacaagaaaaggcttctcttccactgattaaaaattctatatataagtaatattcatatgattaacattcatcattatagttttcttaaatgctatacacattaataaaagaagtattacttccttaaaccactcataaacccagataactttcattcctaccttttcccttaaaagagctatgatttaagagtatagggaaaaaaacagtatttctaaatgttttgcttgacaatggagaaaaaaaaaatcatactgcatgaaagaacaagtatttaaaatgcgctgtcttactgacatgccaatgattgttctgaccctccaggagtagagatataactaaacatattttcagtggtccggcaagacttgtgatgctggcctgga

SEQ ID NO: 14616 - DNA, 240 bp, Bos taurus
  Clone ID: 62-LIB34-052-Q1-E1-H10
atcacagatcaggagactgaaggcaaatttgtggatctgacaggaaagggggtgacctaccaaaactggaatgatggcgagcctaacaacgcttctcctggggagcactgtgtgacacttctgtcggacgggacatggaatgacatcgcttgttccgcctcctttttgaccgtctgtgaattctctctctgagggagcatgagcctaaagtcctcctgttcctttactcatctcatgggc

SEQ ID NO: 14617 - DNA, 236 bp, Bos taurus
  Clone ID: 62-LIB34-052-Q1-E1-H6
ctcctccgaaaatgcagcggctgttgactccagtgaggcaggtgttgcaagtgaagagagtgatgcaagaagcttccctcctgcctgcccgccttctcccagcagcccaccccagtttttctacagttccggctgtccccttggccaaaacagatacttggccaaaggatgtgggtattcttgccatggaggtctactttccagcccaatatgtggaccaaacagagctggagaag

SEQ ID NO: 14618 - DNA, 239 bp, Bos taurus
  Clone ID: 62-LIB34-054-Q1-E1-H6
gagcccccccagatagtaaacccaattggccatcttccagaaggtttaccaacaattgaccagggtgcccccttcactttctttcaacctcttcccccttccccagggaccctgtcttccactccagatcattcctttagtttagagctatgcagtgaagtggttatccctgaaggagatagcaagccagactccaccactactgggtttcctcaatgcataaaagaggaggatgcccc

SEQ ID NO: 14619 - DNA, 358 bp, Bos taurus
  Clone ID: 62-LIB34-056-Q1-E1-H10
cgtccacagtccggtcgaactacgtgaaggccatgcggctgttcgtgggagaccccgtgtggacgccatacaaccggccgtcggaccacctcgaggcccggacgcaatacctggagttcctggcgcagtcggcctagcggcccctcgtgaggcagcacggagtctgtccctttctccggcttcagttctgcaggcgcgaggctggggagcctcctctgcaagcttgtcagatcagaacactgtatttttttgatcagaacacgttttaatggatggagccatggagctggttgcacatgcaaccagctggaaatttgggcaggtgattcacttctctgattcggggtcagggtcagtg

SEQ ID NO: 14620 - DNA, 219 bp, Bos taurus
  Clone ID: 62-LIB34-057-Q1-E1-H6
gtgtggagaaaatattaaacaaacagcaggatgattttggaaaatctgtaaccgactgcacgagcaatttttgtttattccaatcaaattccaaggaccttctgttcagggatgacactaaatgtttggcttcaattgcgaaaaaaacatatgactcctacttaggggatgactacgtcagagctatgaccaacctgagacaatgctcaacctcaaaac

SEQ ID NO: 14621 - DNA, 219 bp, Bos taurus
  Clone ID: 62-LIB34-058-Q1-E1-H6
gttgggcgtttagtgccaatggtgctcttgaaggacagatgttccggaaaactggcaaacttgtttcactgagtgagcacaacctggtggactgctctcgggctcaaggcaatcatggttgcaatggtggtctaatggataatgccttccagtatattaaggacaacggaggcctggactcagaggaatcttatccatatcttgcaacggacacatata

SEQ ID NO: 14622 - DNA, 207 bp, Bos taurus
  Clone ID: 62-LIB34-059-Q1-E1-H10
atcactacacaggtggcatgaaacaaaagtacactgtgagccagtgcagccagaggtccgaagatttatacctctacctgggagaaaggacctactatatcgcagcggtggaggtggaatgggattattccccaagtatgaaatgggaaaaggagctgcatcatttacaggaacaaaatctttcaaatgcatttttagataaggaag

SEQ ID NO: 14623 - DNA, 209 bp, Bos taurus
  Clone ID: 62-LIB34-059-Q1-E1-H6
gcaccccactccagtactcttgcctggaaaaccccacgggcagaggagcctggtaggctgcagtccatggggtcgctaagagtcagacacgactgagcgacttcactttcacttttcactttcatgcattgcagaaggaaatggcaacccactccagtgttcttgcctggagaatcccagggacgggggcgaccttgtcgggctgccgc

SEQ ID NO: 14624 - DNA, 243 bp, Bos taurus
  Clone ID: 62-LIB34-060-Q1-E1-H6
cgcgtccgggggctgtgtgccctgtcatcagagccctgtggtagacgtcagcacagccataacctcgggacattcctgtgattcccatgtgtacttaccgttcctcaaaggataacgaaactgccgggcaacgcacctaccaccaaatccccgtggccaccaagcggcaggtctgggaactggccaaggccaattctcactttgacattgacttcgatcaacatttgtcagactctagcagta

SEQ ID NO: 14625 - DNA, 368 bp, Bos taurus
  Clone ID: 62-LIB34-061-Q1-E1-H6
aggagaaaacttctgatcagatccactttttctttgccaaactgaactgccgactctatcgaaaagccaataaatcctctgagttggtatcagccaaccgtctttttggagacaaatccattacattcaatgagacctaccaggacatcagtgaggtggtatatggggccaagctccagcccctggacttcaagggaaatgcagagcagtccagattgactatcaaccaatggatatccaataagactgaagggcgtatcactgatgtcattcccccacaagccatcaatgagttcactgtcctggtgctagtcaacaccatttacttcaagggcctgtggaagtcaaagttcagtcccgagaacaca

SEQ ID NO: 14626 - DNA, 392 bp, Bos taurus
  Clone ID: 62-LIB34-064-Q1-E1-H6
tgactgtgacatactaatccctgctgcaagcaaaaaccagctgaccaagtccaatgcaccaagagtcaaagccaagatcattgctgaaggtgcaaacggaccgacaactccagaagctgataagattttcctagagaggaacattatggatattccagatctctacctgaatgctggaggagtgacagtgtcttacattgaatggctgaagaatctaaatcatgtcagctacggtcgtttgaccttcaaatatgaaaaggattctaactaccacttgcttatgtctgttcaagagagtttggaaaggaaatttggaaaacatggtggaactattcccattggtcccacagcagagttccaagacacgatatcgggtgcctctgagaaagaca

SEQ ID NO: 14627 - DNA, 262 bp, Bos taurus
  Clone ID: 62-LIB34-066-Q1-E1-H6
ataaagccccccgcaatgtcacaataccaaacccctctgttcgtatgatccgtaataattaccgccgtactactactactctcgctccctgtattagcagccggcatcacaatgctattaacagaccggaacctaaatacaaccttcttcgacccggcaggaggaggagaccctattctatatcaacacttattctgattctttggacaccccgaagtctatattttaatcttacctgggtttggaataatctctcatatcg

SEQ ID NO: 14628 - DNA, 206 bp, Bos taurus
  Clone ID: 62-LIB34-067-Q1-E1-H10
gtgaattgctggctttctgctcactcctccgaaaatgcagcggctgttgactccagtgaggcaggtgttgcaagtgaagagagtgatgcaagaagcttccctcctgcctgcccgccttctcccagcagcccaccccagtttttctacagttccggctgtccccttggccaaaacagatacttggccaaaggatgtgggtattcttg

SEQ ID NO: 14629 - DNA, 232 bp, Bos taurus
  Clone ID: 62-LIB34-067-Q1-E1-H6
gccgccgggacacaggtgtcgtgaaaaccaccgttaaacctaagccaaaatgggaaaggagaagacccacatcaacatcgttgtcattgggcacgtagattcagggaagtctaccacgactggccatctgatctataaatgtggcgggatcgacaagagaacaattgaaaagttcgagaaggaggctgccgagatgggaaagggctccttcaaatatgcctgggtcttggac

SEQ ID NO: 14630 - DNA, 260 bp, Bos taurus
  Clone ID: 62-LIB34-069-Q1-E1-H10
taccggacggccattcggcgtcgaacacgcgtccggactgctcattttaagatgaggagggaaaacatcgtgctggatgaaggtatgctgcagtcactaatggagcttccagagcgataccactatggcatgtacgccaagttcatcaatgactacggcacccattacataacgtctggatcgatgggtggtgtctatgagtatatcctggtgcttaacagagagaaaaatggaaacagctggtgttaccaagcgcctga

SEQ ID NO: 14631 - DNA, 215 bp, Bos taurus
  Clone ID: 62-LIB34-069-Q1-E1-H6
gggagctggtggctcttccatccccagaccagccaagcctgtgagtgacaccccagacagaggaaccagagccatgcggagtctcagcggactgctgttgttactgactgcctgcctggcagtaaacgccagctccgtgcccacattgcccgatgacattcaagtgcaggagaacttcgacctgtctaggatctatgggaagtggttcaatgtgg

SEQ ID NO: 14632 - DNA, 224 bp, Bos taurus
  Clone ID: 62-LIB34-070-Q1-E1-H6
ggattttgccaaagctaacaacaatgataatacatttaaacaaatatcagaagatctgagaagcagaattgagatcctgaggcgcaaagtcatagaacaagtacaacgtatcaacgttctgcagaaaaatgtcagggatcaactggtagatatgaaacgattggaggtggacattgatattaagatccgatcttgcaaagggtcatgcagtagagctttagaac

SEQ ID NO: 14633 - DNA, 380 bp, Bos taurus
  Clone ID: 62-LIB34-071-Q1-E1-H6
actagttctagatcgcgagcggccgcccttttttttttttttttttttttttttttttttatagtgtacagaaaatgcactatttaatactcattaaatgcagtacaatcaatgaagattatcaaataagaaacacacacagcattctaaatttttaaatcatcttagggctgctatatcagggattgtacaaattgtatgtgcaagacaaaaaacaaacaaaaaaacccccaaaaaacaaagaagaaaaagaaagaaaaaacccaaagaaactcacttctcagtgcatcacacccactggaataaaacatatggcaccgttacactttcacttttatattaacaactgtcaattaaagctaggagtgactcccgacatt

SEQ ID NO: 14634 - DNA, 414 bp, Bos taurus
  Clone ID: 62-LIB34-073-Q1-E1-H6
agcggacgcgtgggcaggcatcaaagcagagaccacgggaacctagttcaccaggctcgaggctggaggccccgccatgacatccctaaggccccttctgatgctggccctgctggcgtgggttgttgtggctgaccaagagtcctgcaagggccgctgcaccgagggcttcaacgccaccaggaagtgtcagtgtgacgagctctgttcttactaccagagctgctgtgccgacttcatggctgagtgcaagccccaagtgactcgtggggatgtgttccatctgccagaagatgagtacgggttccatgactacagcgacgcgcagaccgtcaacagcaacgtggaagcacagcccgagagcaccaccctggcccctgttctgcaggctcagaccctagagactcctgtcca

SEQ ID NO: 14635 - DNA, 401 bp, Bos taurus
  Clone ID: 62-LIB34-076-Q1-E1-H10
gacccaaacgtcaggggaattccctggaaaaaagatcagtacgcagagctctggggaatagagctcaaaggcaaagaaaatgctagttaatagtacattgcttaatgttaaattgttacctgaaaagtttctacaatgcttaaaactgctaagtgtggggaaggaaaaaagcaaagttgttttgctttgctacaagaaggggaagactgaaaagttaactgaaacctggatatcagtctcttgaaacattgttacggacttgcatcagcagattaacatctttcactcctttgcacgcttcttaagtggtttatctgaaggtgtgcaatgttcagggactagtttcagaaaagactttcagtaccctaattgtgggcttttaaagtattttgagatttggt

SEQ ID NO: 14636 - DNA, 419 bp, Bos taurus
  unsure (6): unsure at all n locations; Clone ID: 62-LIB34-076-Q1-E1-H6
ccgtgnaagaagacttctttctatacattgcctacagtgatgaaagtgtctacggtctgtgaagctgctgcccctaaagtggggggtcccattctacaaagagagaggtggccccccttccttgacctactcctccttgaggttcaaacaccacctcccttcttcaggacctgcacttcctaatgtttgagactctcctatagaccctcttaacacaagggttaatgggggagatggcctctaatacctcccctttctttcttcccctttctttatcacctttcccattctgctttagacttcttgattgtcaatctctgtcacatctggtaattgttttggtttctgttccctttctaactgcccaaggcgctcagagccccaacagtcctttcttttcaataacttccttttggggg

SEQ ID NO: 14637 - DNA, 320 bp, Bos taurus
  unsure (31)...(32),(35),(51),(111),(147),(159),(183),(190),(235),(240),(245),(253),(260),(262),(294): unsure at all n locations; Clone ID: 62-LIB34-077-Q1-E1-H6
ctctatagagagtcgtattagtggttctggnntgntgtgggggcctgggtntttcgtgcgtcctcgtgtggctgctggggcgtggctttgtcgtccttgcctccctggccngcttcggcctgggtgctgcctttgcggttgcctggngtgtcgcgctgncgcttggggcctgctcggtgttcnttgtggncctctgcccggcgtttgtggtggcgttcgtctggccggccgtccngtccngcgcnctgttcgnggtccgntncctcctgggcgcctctctcgcttggccctgcntcgcccgctcgctggtggtgatcgcc

SEQ ID NO: 14638 - DNA, 456 bp, Bos taurus
  Clone ID: 62-LIB34-078-Q1-E1-H10
caacacactatagagagtcgtattagatgtccgtcgccggggcaccctgcagtcctactttgactgaccaggcctgctggggcttggggctttgcctcagataaacctaggaagcttagggacaaggttcattctcctgctttaaaaagtgcatcaactgtagtgctttaaacaatcatatttttaacaggggtcttaagcctgggttctttttattacttttctctgataaaaggaaaataatttgtgttaggtcttactctctactcctaaattttttactgtttggcttcaagcataaaaatttggtgaatgtctaccaaaacaaaaattagtcatttgagtaacgtggccactaatacatttaaccgtctacctccgtttttaattttcttttccataaggcagcttgaaatgttggtcctaatcttcacttttgtttttcctttttgctaa

SEQ ID NO: 14639 - DNA, 453 bp, Bos taurus
  Clone ID: 62-LIB34-078-Q1-E1-H6
cggcgacagtctgacccacccgccatgctccccccagcgctcgtcttgctgttggggtttctctgccacgttgctatcgcaggacgaacctgccccaagccagatgagctaccgttttccacggtggttccactgaaacggacctatgagcccggggagcagatagtcttctcctgccagccgggctacgtgtcccggggagggatccggcggtttacatgcccgctcacaggactctggcccatcaacacgctgaaatgcatgcccagagtatgtccttttgctgggatcttagaaaacggaacggtacgctatacaacgtttgagtatccaacaacatccgcttttcttggcaaacgggttttacctaaaagagctagttctgcaaatgcactgaggaagggaagtggagcccagaccttcctgtctgtgcccctataacctgccctccac

SEQ ID NO: 14640 - DNA, 407 bp, Bos taurus
  Clone ID: 62-LIB34-079-Q1-E1-H10
agactaacaaggagcccccccagatagtaaacccaattggccatcttccagaaggtttaccaacaattgaccagggtgcccccttcactttctttcaacctcttcccccttccccagggaccctgtcttccactccagatcattcctttagtttagagctatgcagtgaagtggttatccctgaaggagatagcaagccagactccaccactactgggtttcctcaatgcataaaagaggaggatgccccctcagataatgatagtggcatctgtatgagccctgactcctctctgggctctccccaggatagcccttccacctccaggggctctccaaataagagcctgctatctccaggtgccctcagtggctcttcccgccccaaactctacgaccctcctgga

SEQ ID NO: 14641 - DNA, 413 bp, Bos taurus
  Clone ID: 62-LIB34-079-Q1-E1-H6
agcgacaggggttctggtgctgtctgttcaggacggagaccaagagatctccagagagacttccttgaaaggacttggcaggtttgaacatgcattgggggcggcaactccaggcactttgcatcctatggaggtctcagatgtccaatcacactatccgcattcatactaggcaactggcatcgctgcagtggggacaccaggaagttcctgccaaatttaactttgctactgatgtgatagatcactgggctggcatggagaaggctggcaagcgaccccctggcccagccctgtggtgggtgaatggcaacggagatgaggtaatgtggaacttcagccaactgagtgaactcagtcaacagacagccaacgtcttcgcagggccatgtggtctgcagcgtggggaccgt

SEQ ID NO: 14642 - DNA, 424 bp, Bos taurus
  Clone ID: 62-LIB34-080-Q1-E1-H6
agcccacgcgtccgcgggtttgccgccgggacacaggtgtcgtgaaaaccaccgttaaacctaagccaaaatgggaaaggagaagacccacatcaacatcgttgtcattgggcacgtagattcagggaagtctaccacgactggccatctgatctataaatgtggcgggatcgacaagagaacaattgaaaagttcgagaaggaggctgccgagatgggaaagggctccttcaaatatgcctgggtcttggacaaacttaaagctgaacgtgagcgtggtatcaccattgatatctccctgtggaaatttgagaccagcaagtactatgttaccatcattgatgccccaggacacagagacttcatcaaaaacatgattacaggcacatcccaggctgactgtgctgtcctgatcgttgctgct

SEQ ID NO: 14643 - DNA, 387 bp, Bos taurus
  Clone ID: 62-LIB34-082-Q1-E1-H10
agaaccatggcacttggagtcctagaacaccacaatgcataccacattgtaaatcccctcctgtcattgcccatggacaacataaagtagtctctaaattctttacatttgatcaccaagctgtatatgaatgtgataaagggtacatcctggttggagcaaaagaactctcctgcacatcttcaggctggtcacctgcggtccctcagtgtaaagcattgtgtctgaaaccagagatagaatatggaacgttatctgtggagaaggttagatatgttgaacctgaaataattactatccagtgtgagtctggctatagtgtggttggttctgaaaatatcacttgctcagaggatagaacctggtacccggaggtgcccaagtgtg

SEQ ID NO: 14644 - DNA, 337 bp, Bos taurus
  Clone ID: 62-LIB34-082-Q1-E1-H6
actctagatcgcgagctggctacaatcccgacacagtagcatttgcgccaaattcaggctgcaatggtgaaaagatgctataacgaagtgctaaaagtccatggatcaatggatggacagtcagccgtaaagaccgcaacgccaatggaagcaccctgcttgaagctctggattgcattctgctaccagcacgcccaactgacaaagccttgcgtttgcctctccaggatgtctataagattggtggtattggtactgtccctgtggatcgtgtggatactggtgttctcaaccctgacatggtggtcagctttgctctagtcaatgtgacaacaga

SEQ ID NO: 14645 - DNA, 399 bp, Bos taurus
  Clone ID: 62-LIB34-083-Q1-E1-H10
cgcgtcagccacgatcaatcatgacgacttacagcgacaaaggagagaagcctgaaagaggccgattcctccactttcactctgtgaccttctgggttggcaatgccaagcaggctgcgtcatattactgcagtaagctgggctttgagcccctagcctacaagggcctggagaccggttcccgggaagtggtgagccatgtggtcaagcaagggcagatcgtgttcgtcttctcctctgccctcaacccctggaacaaagagatgggcgatcacctggtgaaacacggcgatggagtgaaggacattgcgttcgaggtggaggactgtgactacattgtgcagaaagcccgggaacgaggcgccaagattgtgcgggagccttgggtagagcaagata

SEQ ID NO: 14646 - DNA, 414 bp, Bos taurus
  Clone ID: 62-LIB34-083-Q1-E1-H6
cccacgacatccgcggacgcgtgggtgtgtctgaagtaaaaagttatgctttagaaagagtgaaggatcaccagaagtccctggaacccagctgcccccgaggcttcttggacaccatgctgatagaaatggccaaggaaagacacagtgtggaccctatgtacaccttggaaaacatcgctgtgactgtggccgacctgctctttgcggggacagagaccaccagcaccaccctgcgatacgggctcctgattctcatgaaatacccggaggttgaagagaaacttcatgaagaaattgacagggtgattgggccaagccgaatccctgccgtcaaggacaggctggacatgccctacctggatgctgtggtacatgagattcagcgattcatcgacctccttccctccaatc

SEQ ID NO: 14647 - DNA, 392 bp, Bos taurus
  Clone ID: 62-LIB34-084-Q1-E1-H6
aggtcttcttcactctacggattcaaattttaatcacttccagagataccctcacagatatgtatggaaataatattttaccatctatctgggcatccccattcaggttgatttgtaaaattaagcatctcacacagctagtgaacagttgagctgaggttggattccagtttttctcttcccttccttcttttcctcctcctgtttcattcttgcacacaaaaaaactattaaattgaattttaggagaacttgacagaaagaagtagaggtgagcttgaagttaatgacctttaggtaaatatttcttcgagtgtataatgaggataataatgtacctttcttgtagctccgttgcacagaatccataagacatgtataaagcactttga

SEQ ID NO: 14648 - DNA, 401 bp, Bos taurus
  Clone ID: 62-LIB34-085-Q1-E1-H6
agcttgggtcgtttcttgtgctgcttcatctaattgaatcatcagattttgcatgtttctagtgtaggttgtttttttttttttaagaaggcccagaaataagagcttaaagatttctaataattgttctacaaaaaaacagtcagatagatgataaaaagagaaagtggcctccaagacctagaaaagatactcaatcccgtctttgattaaaaacaccagcaatgtcaacaagaagcctaagaaccatgagagaacattgccgctggcccatctctgagcttaaacagtttgcacaaaggttttgattgcacagagattctcagctaacagtttctcaggttttacagactctccttcggaagtgaaaactgcttttctgcccccataatgaaatcttg

SEQ ID NO: 14649 - DNA, 444 bp, Bos taurus
  Clone ID: 62-LIB34-086-Q1-E1-H6
cgggtggacccacacgtccggacacagcatgccacaagattgcccccaacctggccaactttgccttcagcatataccaccatttggctcatcagtccaacaccagcaacatcttcttctcccccgtgagcatcgcttcagcctttgcgatgctctccctgggagccaagggcaacactcacactgagatcctgaagggcctgggtttcaacctcactgagctcgcagaggctgagatccacagaggctttcagcatcttctccacaccctcaaccagccaaaccaccagctgcaactgaccactggcaatggtctgttcatcaatgagagtgcaaagctagtggatacgtttttggaggatgtcaagaacctgtatcactccgaagccttctccatcaacttcagggatgctgaggaggccaagaagaagatcaacgattatg

SEQ ID NO: 14650 - DNA, 421 bp, Bos taurus
  Clone ID: 63-BOVMS1-001-Q1-E1-H12
aagtattacagtatgatgacatctgtaagatagactttggaacacatataagtggtaggattatcgattgtgcttttactgtcacttttaatcccaaatatgatacattattaaaagctgtcaaagatgccactaacactggaataaagtgtgccggaattgatgttcgtctctgtgatgttggtgaggctatccaagaagttatggaatcctatgaagttgaaatagatgggaagacatatcaagtgaaaccaatccgtaatctaaatggacattcaattgggccatatagaatacatgctgggaaaacagtgcccattgtgaaaggaggagaggcaacaagaatggaggaaggagaagtatatgccattgaaacctttggtagcacaaagaaaagtgtggttcatgatgatatggaatg

SEQ ID NO: 14651 - DNA, 395 bp, Bos taurus
  Clone ID: 63-BOVMS1-002-Q1-E1-H4
ccacgcgtccaaccgagttttaagtgtgtgtacaggtttcaaagcattaaatggagtaagtagcttcctggtcaacccccatccaggcaggaattgcatcgactctggaatacctaccttctgtcaattattcagatcagatatggcctattttcatatttaatcctaagccatcaaatgggttcgtgcctcttaaataataacaatactttagacattggcactttatttttctcattgatctttagctacttgggggaggacggaaggtgctgataccttcaatttactacttttcaagatgatttttaaaagatgagtagtgtagcgtccactttttataaagctttcaagtgtctttatggaaacagattgggagtgtggaaatgctgcct

SEQ ID NO: 14652 - DNA, 301 bp, Bos taurus
  Clone ID: 63-BOVMS1-003-Q1-E1-H12
aatgaagattaattggggggcactaatagacgccatacaaagagaaacgggtgcaactttcccaaggctaacggaaacggcaatggtggttaaggtaatggtactccccaaccacgaaggatacaaatttgtaaaataggtaacctcggtaaaaattccacagatgtgggacaaatttgcaagtcaaaatggtcaaaagggtacttgtggtattcagtataaacaggaggaaatgcctttcacctgtgaaggtatcacccctgatatcataataaatccccatgccatcccctctcgtatg

SEQ ID NO: 14653 - DNA, 349 bp, Bos taurus
  Clone ID: 63-BOVMS1-003-Q1-E1-H4
aaagggcttatcaaaaaacccgggaccctttaaaacaccttaaatcaaaaggttcaaaaccaaacttttaacaaaatccaaaaatggcaccaaccaaaattataaaaaccaaacaacccctggggaaccaaaatgaacgaaaattaattaacccctttaattacccctgtaatttaggtctccctctcgtaacccttatcgtactattcccaagcctactattcccaacatcaaaccgactagtaagcaatcgctttgtaaccctccaacaatgaatacttcaacttgtatcaaaacaaataatgagtatccacaattctaaaggacaaacatgaacattaatattaat

SEQ ID NO: 14654 - DNA, 292 bp, Bos taurus
  unsure (221): unsure at all n locations; Clone ID: 63-BOVMS1-005-Q1-E1-H12
gcattagacactttagtggacctgagccaggtcagccctgtacctcagcttcccaccctgacttgcatgatggcgaaaaggacaattttggtacatcccagactgcattcgcccactccacgttttacagcaagagttgtctggatgaccaacagtcaggctttcaagagagcaaggaattaccttcaagcacagaggcaggcaaggaaacggcttcaganaagagtcaactacaatgattcaagatgcatggagactttcatttccacattttcccatttggttttgtttt

SEQ ID NO: 14655 - DNA, 416 bp, Bos taurus
  unsure (58),(91): unsure at all n locations; Clone ID: 63-BOVMS1-005-Q1-E1-H4
tttcaactaaaagtttcaaaacacaacttttatcacaatcaagaactgacaacaacanaaatattaaaacataacaccccttgagaaacanaatgaacgaaaatttatgtacctcttttattacccctgtaattttaggtctccctctcgtaacccttatcgtactattcccaagcctactattcccaacatcaaaccgactagtaagcaatcgctttgtaaccctccaacaatgaatacttcaacttgtatcaaaacaaataatgagtatccacaattctaaaggacaaacatgaacattaatattaatatctctgatcctatttattggatcaacaaaactaacaagcctattaccccattcaatcacaccaacaacacaaactatcaataaaacctacgcataaccatccccc

SEQ ID NO: 14656 - DNA, 272 bp, Bos taurus
  Clone ID: 63-BOVMS1-006-Q1-E1-H4
gtccggttcaagaacgcgagcggccgccctttttttttttttttacaaggtgtcacttaatttttatttctggtctctcccacccccaggtatcataaataataaagcattttgtctttgacttgactgtgaataattttcttccgaagagctcttctaacttcgggtgaagactgtgatcgcttctgaggagagatacgcggacgcgtgggcgaggatgaggtggaacgtgtgatcaccattatgcagaatccacgccaataaaagattcc

SEQ ID NO: 14657 - DNA, 318 bp, Bos taurus
  Clone ID: 63-BOVMS1-007-Q1-E1-H12
atgcgacgtcatagctcttctatagtgtcacctaaattcaattcactggccgtcgttttacaacgtcgtgactgggaaaaccctggcgttacccaacttaatcgccttgcagcacatccccctttcgccagctggcgtaatagcgaaaaggcccgcaccgatcgcccttcccaacagttgcgcagcctgaatggcgaatgggacgcgccctgtatcggcgcattaagcgcggcgggtgtggtggttacgcgcagcgtgaccgctacacttgccagcgccctagcgcccgctcctttcgctttcttcccttcctttctc

SEQ ID NO: 14658 - DNA, 432 bp, Bos taurus
  Clone ID: 63-BOVMS1-007-Q1-E1-H4
cgacccacgcgtccgcttaaaaatggactggttggatctccttgcagtccaagggactctcaagagtcttctgcaagaccacagttcaaaagcatcaattcttcggggctcagacctcaaaaaggggtatataacttcaaacagttttttggtcctgttaaaaaacagttcctatacatggttttggatatggtataaatttgctttctgctgaacattgttcactctctcatatgattctgcctatttaatgaatatttttttgtggggttgaaactcaatgccttatgtggtcacttagatttccttttgctgctcgttttcctcttactgtatatgttcagattttgtcagtgctggcaaaacctccaagactgtcaagaaaatgcttgaaagttgatctgtcatagtgtaaattcatgatacaatgtc

SEQ ID NO: 14659 - DNA, 345 bp, Bos taurus
  Clone ID: 63-BOVMS1-008-Q1-E1-H4
taattttgtcaaagttaagttacaagtgaaagtcctgtacacctcatatggcatatcccatacaactacgattctaacatgcaacatcaccaatcatagaataactacttcactttcatgaccacacgctaataattgtcttcttaattagctcagtactacgttagattacttcactaatactaacgacaaagctgacccatacaagcacgatagatgcacaagaagtagagacagtctgaaccattctgctcgccatcatcttaattctaattgctcttccttctttaacaatttcaaacattatagatgaaatcaataacccatctcttaacagtaaaacca

SEQ ID NO: 14660 - DNA, 336 bp, Bos taurus
  Clone ID: 63-BOVMS1-010-Q1-E1-H4
ggattggggcccaaaattacccttccggtccgtttggttaccgctgaaatcaagactatttatttggaatagatacagcagtgtttttcacttcctttgcaaccgttgagaacagccttccctaccttttgcaaggaattaatattccatattggattcgcaaagacttcgatatggtgtgtctagcaaacctagaaactgtctctcaccctttcacgactgtggcctgagttcctaacccctcccttttgttagatgaaactcttagcacaagttcagttatttaaacgtgcagcattgcccgagtgtgtgtgtcgaagcatcgacacagctgat

SEQ ID NO: 14661 - DNA, 459 bp, Bos taurus
  Clone ID: 63-BOVMS1-012-Q1-E1-H4
cgtgattccagtgtgaaaacgcaccaaagaaagaagtacctgtaagtccgggtcatcgaaaaacgccattcacaaaagacaaacattcaagccgcttggaggctcacctcacaagagatgagctacgggcaaaagctctccatatcccattccctgtagaaaagatcattaacctcccagttgaggacttcaatgaaatgatgtccaaggagcaattcaacgaggctcaacttgcattaattagagacatacgtatgaggggtaagaataaagtggctgctcagaattgcagaaaaagaaaactggaaaatatagtggaactggagcaagatttagatcatttaaaagatgaaaaagaaaaattgctcaaagaaagaggagaaaatgacaaaagcctccatctactgaaaaaacaactcagcaccttgtatcttgaagtcttcagcatgctacgtgatg

SEQ ID NO: 14662 - DNA, 420 bp, Bos taurus
  Clone ID: 63-BOVMS1-014-Q1-E1-H4
cttgaaggagcagctggccatggtggagcgcagagccaacctgctgcaggctgagatcgaggagctgagggccaccctggagcagacagagaggagcaggaagatcgcagagcaggagctcctggatgccagtgagcgtgtccagctcctgcacacccagaacaccagcctgatcaacaccaagaagaagctagagacagacatcactcaaatccagggagagatggaggacattatccaggaagctcgcaacgcagaagagaaagccaagaaggccatcactgatgcagccatgatggctgaggagctaaagaaggagcaggacaccagtgcccacctggagcggatgaagaagaacctggagcagacggtgaaggacctgcagcaccgcctggacgaagctgagcagctggccctgaa

SEQ ID NO: 14663 - DNA, 248 bp, Bos taurus
  Clone ID: 63-BOVMS1-016-Q1-E1-H12
gtaacaaatgggagtatctatgttaatccacctcttggaactaaatgtagtctggtacttaatcgctgaaatgctggacgaatatgaggaagggtcctggggaacggctcttgggttccagctcccattatctggaaaacagttttaggttttaaccaaaggtccgtatgtgcacatttgtgaggtacccatgtttaatgtggacaaccgtcaataccttgcaatatctaagctttttagatgtcctg

SEQ ID NO: 14664 - DNA, 366 bp, Bos taurus
  unsure (320): unsure at all n locations; Clone ID: 63-BOVMS1-016-Q1-E1-H4
gagatccgaaggccatccactaccaaaatggatttaacggaagaagaggaagcccaggtacgcaaagagaaccattggtgtgaggagaattgaaatttcgtgtcaaatgctgtaacactgtaaggattattccaaatactagttgcactgctttgtttataattgttaatattagaaaaagagtcaacaaatgcagcagcaagtcaattgtatcagcagaatgttgtcctcattgcatgtgtagtttcagtacagttcccaaacttaaggcccagtttcttctagtgtgattgaaagtttcttttctttgctctgaatanaattgaactgtgggttccctatagaaagtggcattttgggctttcc

SEQ ID NO: 14665 - DNA, 379 bp, Bos taurus
  Clone ID: 63-BOVMS1-017-Q1-E1-H4
ggtcgacacacgtccgggtttcccaaaaaccgtgttattggaactggttgcaatctggattcagctcgcttccgttatctcatgggggagaggctgggagttcacccattaagctgccatgggtggatccttggggagcatggtgactctagtgtgcctgtatggagtggagtgaatgttgctggtgtctccctgaagaatttacaccctgaattaggcactgatgcagataaggaacagtggaaagcggttcacaaacaagtggttgacagtgcttatgaggtgatcaaactgaaaggctacacatcctgggccattggactgtcagtggccgatttggcagaaagtataatgaagaatcttaggcgggtgcatccga

SEQ ID NO: 14666 - DNA, 127 bp, Bos taurus
  Clone ID: 63-BOVMS1-018-Q1-E1-H4
aggtaatcacggttctgccaaaacacaaaaggaaattgaaggaacccacttacaaaacggaaaaaaatcggaaaaatattctcaaacttcaggacttggaagataaacttcaggcgaaagtgaaatc

SEQ ID NO: 14667 - DNA, 414 bp, Bos taurus
  Clone ID: 63-BOVMS1-019-Q1-E1-H12
cggtccaaccaagccttccgaaaaaaaaaaaaaaaaaaaaaaaaaaaaaaaaaaaaaaaaaaaaaaaaaaaaaaaaaaaacaaaaaaaataataaaaaaaaaaaaaaaaaaaaaaaaaataaaaaaactacaaaaaaaaaaaaaaaaaaaaaaaaaaaaaaaaaaggggggcccccccaaaggattcaaactttctttacctttaaataaatttttaaacctcttcaaaattccccctaattttaatttaatgggccttcttttaaaaacttctatctggaaaaaccctggttttacccaatttaaccccctttaaaaaaaacccccttttccaaaatgggctaaataccaaaaggccccaaacttttccccttcccaaaaatttcccaaccccaatggacaattggaaccccc

SEQ ID NO: 14668 - DNA, 365 bp, Bos taurus
  unsure (307): unsure at all n locations; Clone ID: 63-BOVMS1-019-Q1-E1-H4
atgcgacgtcatagctcttctatagtgtcacctaaattcaattcactggccgtcgttttacaacgtcgtgactgggaaaaccctggcgttacccaacttaatcgccttgcagcacatccccctttcgccagctggcgtaatagcgaagaggcccgcaccgatcgcccttcccaacagttgcgcagcctgaatggcgaatgggacgcgccctgtagcggcgcattaagcgcggcgggtgtggtggttacgcgcagcgtgaccgctacacttgccagcgccctagcgcccgctcctttcgctttcttcncttcctttctcgccacgttcgccggctttccccgtcaagctctaaatcgggggctccc

SEQ ID NO: 14669 - DNA, 357 bp, Bos taurus
  Clone ID: 63-BOVMS1-020-Q1-E1-H4
gcacttaacgtgtcacacattatcatgggccataattaaacaggtactcccatacctcaccagcacagaacaactgattgtgtttgccgctctacatctggacattttgtctaaacatcttaatacggctcttatccacatgtcgcagatgatgccatttcttcacagggagacataattaatattaggcacttgacattttggtatctcaaattctaagacggtgcttgtacttgcttgtaattcacatagtagatttgttgatgttaggagtatcattgatgttaaatgtgtgtaaatttgtatccttcatactaactcaatctgttactctgatacacagtaaatgtaacagca

SEQ ID NO: 14670 - DNA, 285 bp, Bos taurus
  Clone ID: 63-BOVMS1-021-Q1-E1-H4
atgccacgtcatagctcatcgatagtgtcacctaaattcaattcactggccgtccttttacaacactcagactgggaaaactctggagttacccaacttaatcgccttgcggcacatcccccttgtgccagctggcgtaatatcgaagaggttcgcaccgttagcccttcccaacagttgcgcagcctgaatggcaaatgggacgcgccctgtatcgggacattaagcgctgcgggtgtggttgttacgcgcagagtgaccgctacatttgccatcgccccatcg

SEQ ID NO: 14671 - DNA, 438 bp, Bos taurus
  Clone ID: 63-BOVMS1-022-Q1-E1-H4
taccggtcagagaattcgcgggacgaacgagtccgccgtttaacaacctttcaactaaaagtttcaaaacacaacttttatcacaatccagaactgacacaaccaaaatattaaaacaaaacacaccttgagaaacaaaatgaacgaaaatttatttacctcttttattacccctgtaattttaggtctccctctcgtaacccttatcgtactattcccaagcctactattcccaacatcaaaccgactagtaagcaatcgctttgtaaccctccaacaatgaatacttcaacttgtatcaaaacaaataatgagtatccacaattctaaaggacaaacatgaacattaatattaatatctctgattctacttattggatcaacaaacctactaggcctattaccccattcaatcacatcaacaacacaactatcaat

SEQ ID NO: 14672 - DNA, 397 bp, Bos taurus
  Clone ID: 63-BOVMS1-023-Q1-E1-H4
cacccgtccggtattgcaatttaaaaaaagaatacgtgcaaatgagctttgcagaacttgttcatatttgatggctgtaagggctataaattaacttgatgggggtattttcccctatcatattaaatttaaaaacaaaatacatcccaaacgttgataatgtataagtatttttaatgcagttgggggatttaggaagtaaactttttgtttgcatctccatttgctttttttttaaatagttctggtcatcaaaagttatgtttctttgcttacttcattttatcctccaataattcaagactggaacaaaaatataaatgttatttatttcaagcaacattttttttctgtgttgtttctaaatatatattcacggtaaataattcactttttt

SEQ ID NO: 14673 - DNA, 339 bp, Bos taurus
  unsure (198): unsure at all n locations; Clone ID: 63-LIB188-002-Q1-E1-H4
ccttcaaggggatcctcaaaaaccaaagagcaaagtcctttgaacagcaagtccctccggccgggtggagagcaaaagagctggaagctccgagacttgttttttccaaatttctcctgcgccttgctgagaagcttccagatcaagtcttccttgccatccacacttcgggccacgacagcatgagaagggacctgngccaggtggcactccttgaacgcatccactggcgcccgactgttgttcaggcagagaagctcatactggtccctgtcagccttctctggcaagttctcaaacactgtcgtctctttaacaaaagccacgtctccagccccg

SEQ ID NO: 14674 - DNA, 424 bp, Bos taurus
  unsure (418): unsure at all n locations; Clone ID: 63-LIB188-003-Q1-E1-H12
ggaggcgggatacatactaaaattccagtatcttcaggtactgacttcaggatcgtgttcaggtggttatcaggggatgacaagtctgaagtctgcacggcatgccatgcaggctgggatgaattgcatctggaatctgaaggcagtcactggaagaattccctcttcctgagggaggttagggcttctctgagagctcagttggtaaagaatctgcctgcaattcaggagaccctggttcgattcctgggttgggaagctctgctggagaagggatagactacccactccagtattcttggacttcctttgtggctcagctggtaaggaatctacctgcaatatagatctgggagatctgggttcgattcctggattgggatgatccaaggtgaaaggctccagtattctggcctgnagaatt

SEQ ID NO: 14675 - DNA, 351 bp, Bos taurus
  Clone ID: 63-LIB188-003-Q1-E1-H4
gccggatactactgcacagcgtttatcggaaagcttttgcttggcaccctgcccacaagctgagctctctgccccaggtcctttgatgaggaggcgcctgtaggctgccaggttggggcaggggcgtcccaactcacacatactctttggcagagttgggcttagggtaggagcgaggcgcacggtatccagctttgctctcactcccaggacaggagcaagagagcagcgcacctcccaggaggaccagagcagaccctgtccagccaatgaagatggcaggaccaaattcatacttaacattcatggggaccaatgggttatagaaatctgagacaatctgatggccgt

SEQ ID NO: 14676 - DNA, 373 bp, Bos taurus
  Clone ID: 63-LIB188-004-Q1-E1-H4
gatacttaagctagacagagtcactctatctcccctagtgatttttgtttttttcttttttttttttttttttttttttttttttttttttttttttttttttttttttttttttccgggaaaaattttttttccaaaaaatttttccccgggggattttaaaaacaggaattttggggtttaattttttaattaggggtttaaaacaaatttttccaaaaacaaattagggttcccccaaaaaaatgggcccccaaaaattgaaaacccttaaggggtttaaaaaggcaaattttggcccaaagggggaattttggtccaaccccgaaaccccaggggggggtccccaaaaagtccccccgaaatcccaggg

SEQ ID NO: 14677 - DNA, 306 bp, Bos taurus
  unsure (186): unsure at all n locations; Clone ID: 63-LIB188-005-Q1-E1-H12
acagagtcactcaagcccctccagggagctgtggcaaaattcctccccgcaacctgtttccccggcattgataaacaagcataccccaacctgtgtcaactgtgcaagggggaggggaaaaaccagtgtgcctgctcctcccgggaaccatacttcggttattctggtgccttcaagtgtctgcangacggggctggagacgtggcttttgttaaagagacgacagtgttgagaacttgccagagaaggctgacagggaccagtatgagcttctctgcctgaacaacagtcgggcgccagtggatg

SEQ ID NO: 14678 - DNA, 364 bp, Bos taurus
  Clone ID: 63-LIB188-007-Q1-E1-H12
tcaggataccaaatggccagggggctgtgtagattcttccccccaaaaaggcccttcttgttaaggaagaggatgatggacgtgtccgtgaaccacttgttgttgcagatactgtcaaacagcttcatgctctcgtgcatgcggttcatctcctcgtcctcggctagcaccaggtcataggcgctcaaagctacacagaagatgatggctgtgacgccctcaaaacagtggatccacttctttcgctcagaccgctgaccgcccacgtcaaacatcttgaagtgtatatctttgagggtgaagtgtgtctccacgatgcccgtggtcttcactcgagtccgcagcacatcctgctgcgtaggga

SEQ ID NO: 14679 - DNA, 174 bp, Bos taurus
  Clone ID: 63-LIB188-007-Q1-E1-H4
gccatgggcgcaggatactcctccaaacgggaatcccttaagaacctgaagaggtgcaacattaaaagctacgattatccaataacaagtgttccaaccttcaattgccaaccgcttcctcctcctgttccccagagttatcgggatgaaaacgtcttccccgtgaatggtttc

SEQ ID NO: 14680 - DNA, 421 bp, Bos taurus
  Clone ID: 63-LIB188-009-Q1-E1-H12
ggcagcgggactatctttcttgtcagtgatagagatgatctttgccgccatcttttttgttgtctacatgtgtgacctgcacaccaagatacagatcatcaactggccttggagtgatttcttccgaacccttgtagcggccattctccacctgatcacctccattgtggtgctcgttgagagaggaaacggctccaaaatcgctgcaggggcgctgggcctatgcgctgcaggcctctttggctatgatgcctacattaccttccccttgcggcagcagagacatacagcagcccctactgatcctgcagatggcccggtgtaggtgaactctcttcatttctctcagcagtctgcaaataacacctctattgaaataattcctccccaaccctataacactcccagtcaactcccaact

SEQ ID NO: 14681 - DNA, 365 bp, Bos taurus
  unsure (64),(264): unsure at all n locations; Clone ID: 63-LIB188-010-Q1-E1-H4
ccgggatagccaagtgaattcacacctgcatacacggcagcactgctcgctctttgacgtgtcncacatgctgcagaccaagatatttggctgtgaccgggtgaagctgatggagagtctagtggttggagatattgcagagctgaagccaaaccagggaacactgtcgctgtttaccaacgaggctggaggcatcttagatgacttgattgtgaccagcgcctccgagggacacctgtatgtggtgtccaatgctggctgcanggagaaggacctgaccctcatgcaggacaaggttatggagcttcagaacaagggcagtgatgtggccctggaggtgatggataatgctctgctagccctgc

SEQ ID NO: 14682 - DNA, 342 bp, Bos taurus
  unsure (240): unsure at all n locations; Clone ID: 63-LIB188-011-Q1-E1-H4
gccatgggcgcagggataccacacaaaaattaaaaggatgaataaatttacaggtgtgaatgcaaactgtttccaactcaaggcaagtaaccagaacagtgctctggtgggaaatcttcagtaagaaaggaaagcaggtcctacggcttggaccttcccaaccccgtgtaagaccggccaagacagaaatgacaactgtttcaaggactcttgccagcctctagagaaatcctggaatangcagctctgacacattaataccctgcacagactgagagactcagtctcccagattcttatcaagccattggattcccctccataaacattctcacctcagct

SEQ ID NO: 14683 - DNA, 393 bp, Bos taurus
  Clone ID: 63-LIB188-012-Q1-E1-H4
cgccctagcggcaggatacttatgatcggccaacccaccgggcacttggacaacctgttgttggtcaaaaggaattccccccaatgaaggatggttgacaaaaaaccaatggcaaacgcaaaaaagccggtgaaactcaatcccaacttaaccaaattaatccgtcccttcaaggcaactggaacaactttggggaatttggtgccaaccaaaagttaatccattagggaaaggaggagacccttaaggaagggaagtaaaattggttcaacaagccgtgtagaaagctctcaatcctgaaagctccatttcaatgcctgagctcttcagcgggttggtgccaagttctacgacgatcatctggttcaatccattgaacacagactttcgcac

SEQ ID NO: 14684 - DNA, 401 bp, Bos taurus
  Clone ID: 63-LIB188-015-Q1-E1-H12
caaacgttaaccaatggtgacaacccaacaaggaattaagggaaaaggaattgaaccctcctaaaaccaacaaccaacttcacttgctttgaattcaattccaaccaaacatctgaaaggcgtttccaacaacatacaattcacggggaggttaacacatctgacactagtcttccatggccatatatgtctcacccaagtgcacaacaggtgtgaatatatactatcggctttatttacaagtttatcttgattttttagtgggggtaaaaaaattaatgatctcaactgactattccccccgaaaagggttttggctatgattcatgttatataaactaccacgtcaaagaaagaaatgaaacccacgtattgtccgatctaaaacatctaaactaaaa

SEQ ID NO: 14685 - DNA, 327 bp, Bos taurus
  Clone ID: 63-LIB188-015-Q1-E1-H4
tcccgaccgccatggatgcttgatctgtacacaatcactcaaccccttcaaggaacttttgccaaattcttccctgccaactgttttccctggaattgaaaaacaagcctaacccaaaccgtgttaaccgttccaaggggaaggggaaaaccaattttgctggtcctcccgggaaacaaacttcggttattctggtgccttcaagtgtctgcaagacagggctggagacgtggcctttgttaaagagaccacagtgtttgagaacttgccatagaatgctgacagggaccactatgagcttctctgtctgaacaacaatcgggcccc

SEQ ID NO: 14686 - DNA, 420 bp, Bos taurus
  unsure (176): unsure at all n locations; Clone ID: 63-LIB188-017-Q1-E1-H12
gatactcccccttgtccttgaccaggtatgccagactgctccatcctgatggaaacttcaacaacccagtccccccaatcactgaccaacgtaggaacggaagacacggccacatactactgtgcaagagtgatcagtgcctggggccaaggactcctggtcaccgtgtcctcggnctccaccacagccccgaaagtctaccctctggcatccagctgcggagacacatccagctccaccgtgaccctgggctgcctggtgtccagctacatgcccgagccggtgaccgtgacctggaactcgggtgccctgaagagcggcgtgcacaccttcccggctgtccttcagtcctccgggctctactctctcagcagcatggtgaccgtgcccgccagcagctcaggacagaccttcacctgc

SEQ ID NO: 14687 - DNA, 393 bp, Bos taurus
  Clone ID: 63-LIB188-018-Q1-E1-H4
ccggggccaccgtgtccatctgcaaccaacttagacaagctggggtccaaattcggaatgcctgcttggagctcaaatgcctgaaacacggaattcagcccgatggccagataccaattgacaagactattgggggaggagacgactccttcaacaccttcttcattgagacaggggctggcaaccatgtgcccagggcagtgtttgtagacctggaacccacagtcattgatgaggtgcgcactggcacctaccgccagctcttccaccctgagcaacttatctcaggcaaagaagatgctgccaataactattcccggggtcactacaccattggcaaggagatcattgacctcgtcttggaccgaattcggaaactggctgaccaatgca

SEQ ID NO: 14688 - DNA, 414 bp, Bos taurus
  Clone ID: 63-LIB188-019-Q1-E1-H4
gaatgagataaagaggttgtagggaaattggacccccaaaaaaaattgttgtgccaaccacaaggtttcttgaaaggttgaactgcctttgctaatggattttaagtttcttaacctcttccgtgatctcttctaggttgacctagaacagaaatcttttgttagctttggctaagtggagaagtattgcttcacggtgacttgtgtgatcctacctgactgttctaaacccttttgatatctatgcactgctgctgctgctgctgctgctgctgctgcttctgcgaagtcgtttcagtcgtgtccgagtctgtgtgaccccatggacggcagcccaccaggccccgcagtccctggggttctccaggcaagaacactggagtgggttgccatgtcctcctccaatgcatgaaa

SEQ ID NO: 14689 - DNA, 362 bp, Bos taurus
  Clone ID: 63-LIB188-020-Q1-E1-H4
tatcattttaagtgaaccatggcttcctgttgacccaaatggtaaaaaatccacctgcaatgcggaaaacctgggttgggaaaatcccctgaaaaagggaaaagttacccactcaagtattcttgcctggagaatctccatggacagaggagcttattggacttcagtccatggtgtcacaaagagtcggacatgactgagcgactaagcacagcacacaaagggaaattgggctttagagttgactcttgtgtcagttaccactttttttttgtaaatgctatctaccttcccttcaagggctgtgtgtgtgtgttttgtttttaaagatgactgagtaactctgctgctctgaatttgct

SEQ ID NO: 14690 - DNA, 378 bp, Bos taurus
  Clone ID: 63-LIB188-021-Q1-E1-H12
atgcaaccgaccgccatgcgcgcgggatcaataactgtgccgatggctttgaaagcttcagtggcgtcatgcgcatggttcttgtcggggtggaatttgagggctagtttgcggtatgccttctttaggtcctcatctgaggcccctctgctcactcccaggatctcgtattaatctttacactgcttgacccttttcacggctgctacttgctcggcggtgtaccctttggtgctctctcctcctgcctcaccgttggctgaggccgtgttggccccagctgctttcctatgggttgtgtgagttgcctctgtgggttgaggttggtcgccggcaagctgtggtttctggttgagggactcgatcagggcgtgaact

SEQ ID NO: 14691 - DNA, 386 bp, Bos taurus
  Clone ID: 63-LIB188-022-Q1-E1-H4
tgtttttacttggtttatccattctctcgttatttgtctctttgctttctattttttatttctttttttttttatttttccttttttttctttttttattttcttttttttttttttttttttttttttgggcccacccaggggtttttaccccaactggggggattaatctcaccgcgcctcaagggggccttttttccccccccaaaaaaccaaatttttacaatttccccggacacccaggggcgcccccccaaaaaaaaaggggggtggacaaaccccccttttaaaaaagccaaacggggcccaaacatttcccttcccccactggggaaacccccaggggaatcgcaaacttccccaacccacgggagaatttttcgccc

SEQ ID NO: 14692 - DNA, 445 bp, Bos taurus
  Clone ID: 63-LIB188-023-Q1-E1-H4
gatacgaacatgataccctgcgaattcctcatcccggtccagagccagcaccccataaggaacggtttgcatcacaagatcctcctggccaacttcttggcccagactgaggccctgatgagggggaagtcgacagaggaggcccggaaggagctacaggctgctggaaggagtccagaggactttgagaagctgttgcctcacaaggtctttgaaggaaatcgcccgaccaactctatagtgttcaccaaactcacgccattcattcttggagccttgattgccatgtatgagcacaagatcttcgttcagggcatcatctgggacatcaacagctttgaccattggggagtggagctgggaaagcagctggctaagaaaattgaacctgagcttgacgggagcagcccagtgacttctcacgattcttcccacaatgggctga

SEQ ID NO: 14693 - DNA, 268 bp, Bos taurus
  Clone ID: 63-LIB188-024-Q1-E1-H12
tcacatcactagattccacttccaaatccttggaatgttcatttctttggctataaagagggactagccgggaaagccaggtaatgcgtaggaaactaaactaacaaaagagcgggtggggcgggcagcgctaatgtcatcctcccggggacgggcacaggggctgttagccgcgggctgactgcggagaactgttagctggagcacggagcagccgtcctcgatgcttgggctgtcgcggggcttcagtcatccccaccacacaggt

SEQ ID NO: 14694 - DNA, 275 bp, Bos taurus
  unsure (31),(116): unsure at all n locations; Clone ID: 63-LIB188-024-Q1-E1-H4
ccatagacgctgcataatgctctataccacnacaaatgaggggctcacatggaattctctgaaagacacgaagtcgtgccacaccgccgtggacaggactgcatgctggaacatcnccatgggcctgatcgtcaaccagacaggctcctgcgcatttgatgaattctttagtcagagctgtgcccctggggctgacccgaaatccagactctgtgccttgtgtgctggcgatgaccacggcctggacaagtgtgtgcccaactctaaggagaagt

SEQ ID NO: 14695 - DNA, 274 bp, Bos taurus
  Clone ID: 63-LIB188-025-Q1-E1-H12
tgaatttttccaatctcaagaaactcttggggtcggtttctggctgtctgcaaaattgcagaatggaatgcatgaattccttaagtgctctgccttggaacactttgaggtctgaccctcaggactctgtgagaatactgccctgcgggacttctcagacccgtagctctggtattctcagggcttgggatcaagatattgtttaccttcaaagacacaattaaatggcttggtttttaaaaaaaaaaaaaaaaaaaaaaaaaaaaaagcttgt

SEQ ID NO: 14696 - DNA, 377 bp, Bos taurus
  Clone ID: 63-LIB188-025-Q1-E1-H4
gcgcgggatacttgtccatctgaatcaggcaacttaacaagcttggtggtgttcaaatgaaattccctcaaatgaagaatgttggccaaagagccaatggcaaacggaaagatgctgtttgaaatcagtcccaacttagccaaattattcagtcctttcaggctacctgcatcaactttggtgattttgttgccatcgagatgtaattcagtaagggaaggaggaagaccttgagggatggtagttatatttgtgtcaacaatgcggatgtaggagagcttcttcattccctgaaaggctccattttcaatgcctgagctcttcagcgggttggtgccaagttctacgacgatcatctggttcaatccattgaacac

SEQ ID NO: 14697 - DNA, 333 bp, Bos taurus
  Clone ID: 63-LIB188-027-Q1-E1-H4
ataattttggactgagtatagaaattaatgttatagcacactttcatgtataataagttgggatctttaaatgttagggcactgaaatcaatgtccaaccaatgaaaacaaaggaaaaaacagggttttaaaatacctgttgctctgcagttgtttggtaagaagcaggaaaaaagtgaaataatttaaaatgttcttatatgtgtttatatgaccaagaacataaccaatccacataacttaattcatttaaaactgcatttgtaaaagtcacacgaaagaaagcatgtgtgccatcagtgtgcccgcctgcactgagcaaacaagaacaga

SEQ ID NO: 14698 - DNA, 387 bp, Bos taurus
  Clone ID: 63-LIB188-028-Q1-E1-H12
ggcattaagactatgctgttgtcgtccgggctgtagctctcggcgtggtatgcgggggtcagtgtggtcatcttgtgtctgttcatggaatacttggagaaaaagcacttcactttgtcagccacctgtcggggcgagcaggtatccctccacatgtcgaggagtttgcagaacatgctgtaggggcctgtcttggcgaccttccggagcctcccgtagacggacagctccgcatatgtcatccccatgtcttcctcatcggtctgggacacccgtccgtgggccacgggctccagctcagctgtggccggtgctgccacgatgctctgcagggcaggaagctggaagcgctcaacgcagaactggacgaaggctctcaggtccgtc

SEQ ID NO: 14699 - DNA, 395 bp, Bos taurus
  Clone ID: 63-LIB188-028-Q1-E1-H4
catgctgccgagccgccatggagcgcgggaggcagcgggatatctaccttcgaggggatcctcaaaaacccaagagcagagtctttgaacagcaggtccctctggccgggtggagagccaaagagctggaagctccgagacttgttttttccaaatttctcctgcgccttgctgagaagcttccagatcaagtcttccttgccatccacacttcgggccacgacagcatgagaagggacctgggccaggtggcactccttgaacgcatccactggcgcccgactgttgttcaggcagagaagctcatactggtccctgtcggccttctctggcaagttctcaaacactgtcgtctctttaacaaaagccacgtctccagccccgtcctgcagaca

SEQ ID NO: 14700 - DNA, 384 bp, Bos taurus
  Clone ID: 63-LIB2809-001-Q1-E1-H4
acgccatgggcgaaggacatatcataccagtggttatgacacacaagccatagtacaaaacaatgacagcacagaatatggactcttccagataaataataaaatttggtgcaaagacgaacagaaccctcactcaagcaacatctgtaacatctcctgtgacaagttcctggatgatgatcttactgatgacattatgtgtgtcaagaagattctggataaagtaagaattaactaacggttgggccataaagcactctgttctgagaagctggatcagtggctctgtgagaagttgtgaacacctgctgtctttgctgcttctgtcctctttctgttcctggaactcctctgccccgtggctacctcgttttgcttctttgt

SEQ ID NO: 14701 - DNA, 439 bp, Bos taurus
  unsure (110): unsure at all n locations; Clone ID: 63-LIB2809-002-Q1-E1-H4
atggccgcgggatacctggtgagattgtggaaagcctttcaagcagtgaggaatctattacacgcatcaataagaaaattgagaagtttcagagtgaggaacagcagcanacagaggatgaactccaggataaaatccacccctttgcccagacacagtctctagtctatcccttccctgggcccatccctaacagcctcccacaaaacatccctcctcttactcaaacccctgtggtggtgccgcctttccttcagcctgaagtaatgggagtctccaaagtgaaggaggctatggctcctaagcacaaagaaatgcccttccctaaatatccagttgagccctttactgaaagccagagcctgactctcactgatgttgaaaatctgcaccttcctctgcctctgctccagtcttggatgcaccagcctcaacagcc

SEQ ID NO: 14702 - DNA, 472 bp, Bos taurus
  Clone ID: 63-LIB2809-003-Q1-E1-H12
catggccgggcgactcaggaatctcagatcagctgaaataaaactcttgatgcaataacagcggtcttgccacccgtggtgtctgaggtgggtctgtcctgtgctcctcggggtcttactcagtgcgtgtggtcaccagctgctcacaggtaaagcggaaattctctttcaccagcaagtttctgctctttatttttagaataaatcatcatggaaatgaagagaggatgctttgctttgggttgtggtcaagaactgattagatgatttggtgtccctggcacacgctgcaaaccgtgcccttcagtcgtgatctcagtggcatatttgttagcttagattctattacattcattatcgcagaggttcagttgaccaagtagttcatgactttctctttttttaaaatttaatttggagttataactgcagtgtttgagaacttaacgtccttgttttctgcaaatactga

SEQ ID NO: 14703 - DNA, 443 bp, Bos taurus
  Clone ID: 63-LIB2809-003-Q1-E1-H4
ctgcaagacggccagttcagccagctaccccttgctggaagccatgaaaggggtcaagtccaactccaaggggaaaggcaacttaggggggattctaaccccggatttgggctaattgtccaaaccttttaaggtggaaccaggcaaaattgggcaccttctccatggtaacctgcttggtggacccctgttacctatggcaaccgctgcatttgatcttggcactgcttcctaagtgctctggtctggtaaatctccgcaggcagtcggtgagggtcgtggttcctgacacgtggctctccccatttaccacactgctctcgcttccagggctcagcggccagaagggtgtggaagagccacggaggtccaggctgatgtcccagaaggggtcgatggtggtggaaaccccatggcacacctggcaagtgacgtcagactgc

SEQ ID NO: 14704 - DNA, 429 bp, Bos taurus
  Clone ID: 63-LIB2809-005-Q1-E1-H12
tggcagccgcaaattggtgataaaccctcacttggtagcctcctgtatgaaagaaggggaccaggacctgggcgattcaggaagttgcaaactgggaagaactaggccctgggggcttggtctattgatctgggaagacctggaaagaaacttcccacttttggaggaggactgatgagtgccgttagagtggctttagcaaaatattgagccacttcctaaatgccttgccttctggatagctccagaagcaaggtctcagacttaagatccagtgccgttccaaggtgagtcaatcagttggcaaatacgtagtgatctctgaacaatactgctcatgcaagttggggctctatgccaacttggacagccgcactggagctccatggagtttattttttttttaatttgctgcagagacttcgacga

SEQ ID NO: 14705 - DNA, 420 bp, Bos taurus
  Clone ID: 63-LIB2809-005-Q1-E1-H4
cattgccgcccgatatcactattgaggccacatgtgtcatctaaatcgtatgtgtatgatacataaggttatgtattaattgtagccgcgttctaacgacaatatgtacacgcctaattgtgtatcatctggcttactgaagcagaccctatcatctctctcgtaaactgccgtcagagtcggtttggttggacgaaccttctgagtttctggtaacgccgtcccgcacccggaaatggtcaacgaaccaatcagcagggtcatcgctagccagatcctctacgccggacgcatcgtggccggcatcaccagagccacatgtgctgttgctggcgcctatatcgccgacatcaccgatggggaagatccggctcgccacttcgggctcatgatcgcatgtttcggcgtgggtatggtggc

SEQ ID NO: 14706 - DNA, 306 bp, Bos taurus
  Clone ID: 63-LIB2809-007-Q1-E1-H12
gatgcttctggagcaaaacttgattaccgacgatatgcagaaacactctttgacatcctggtggctggcggaatgctggccccaggtggtacactggcagatgacatgatgcgtacagatgtctgtgtgtttgcagcacaagaagacctagagacaatgcaagcatttgctcaggtttttaacaagttaatcaggcgctacaaatacctggaaaaaggttttgaagatgaagttaaaaagctgctgctgttcttaaagggtttttcagagtcggaaaggaacaagctggctatgttgactggtgtt

SEQ ID NO: 14707 - DNA, 154 bp, Bos taurus
  Clone ID: 63-LIB2809-008-Q1-E1-H4
gctggatacaaaaggaaagattgggcatatccctctggggaaagggcacggcttcccgggaaaaaggcaggactttggcctgaaaaaggaacaccacggcctgaggaggaaccatgaaatttgaaggaaaaggctgttaaggctggtgcatcaa

SEQ ID NO: 14708 - DNA, 371 bp, Bos taurus
  Clone ID: 63-LIB2809-011-Q1-E1-H12
atggccgcgggatgagacataaatgcctcaatgggcatatctctctggcgatagtgctccccaattggcaagaaggggaaaactaagctctttgtgtccacacaaactgccatgataacccagtcctttgttgcaaaaatgttgggggttccagtaaaccggattttggtccgactgaagagaatcggatgacgctttggatggaacgagacccggggcaccctggtgtctgtcgctgtggccctggctgcatactatactggacacccggttcgctgcatgcccgatcgtacatatgatatgctgattaatgtcggcagacatcccttcctggccagatacacagttggcttcattaacacagggactat

SEQ ID NO: 14709 - DNA, 262 bp, Bos taurus
  Clone ID: 63-LIB2809-011-Q1-E1-H4
agtttagtttccctagcgaatacttcggtggattccttatggaaagaagactgaaaatcagctttacttgaatagcccaccagtaattttgtctgcatcattacagtagaaaactagagctaattatttttaacaattcaaggctaaatcactgctatcaagtaccaaagtgctattttatagaacttattatgaatttaatgagtttgaatatgcattaacagagcattccctgtgtccatatgacaattgactgaaagta

SEQ ID NO: 14710 - DNA, 392 bp, Bos taurus
  unsure (372): unsure at all n locations; Clone ID: 63-LIB2809-013-Q1-E1-H4
aaaagcctttgtcttaagttgaatccatggcttcatagctttctgatgctgataaacagtcttgagatactggggcaaggcgaatttctggtaacgctggctgattttttcagaaaatttaggcgattcttttcttcttcagtcagtttagttttcttagtgaatacttctgttgattccatgtcaacggtcttctttgaattttcctcactggtggagagctgctctctgttcagagtgggagtaatgggaacagcatttctcttaacctgatcccatgggttcaaaacaattggaccttgatacagatactggagatactgggggaacttctgataaaactgattgatttcattcagtgctttctggtantgcttatcgtccacagtaat

SEQ ID NO: 14711 - DNA, 417 bp, Bos taurus
  Clone ID: 63-LIB2809-014-Q1-E1-H4
gggcgggatacaaaattaaggccagtctagacagtcacctaaatcgtatgtgtatgatacataaggttatgtattaattgtagccgcgttctaacgacaatatgtacaagcctaattgtgtagcatctggcttactgaagcagaccctatcatctctctcgtaaactgccgtcagagtcggtttggttggacgaaccttctgagtttctggtaacgccgtcccgcacccggaaatggtcagcgaaccaatcagcagggtcatcgctagccagatcctctacgccggacgcatcgtggccggcatcaccggcgccacaggtgcggttgctggcgcctatatcgccgacatcaccgatggggaagatcgggctcgccacttcgggctcatgagcgcttgtttcggcgtgggtatggtgg

SEQ ID NO: 14712 - DNA, 371 bp, Bos taurus
  Clone ID: 63-LIB2809-016-Q1-E1-H12
tctttttaaattgaaagccaataactctgcctttatgatgctaagctcatgttcttatttcttctcctatcttctttctcttctgttcccattatccttccctttgttttgtccctgtcaccttcctttctccttctcctcattgccccccaggcaagcaggtggtcagtcattggtgggtttccagcttccaaagcctagacaaccctgctgtagtctcaaactagtggtctttgccccggctgaccctttccttgagctgtctgagctttaaggtggatggctcaagctagagatatgacagaatcttctgggaagggccttgatgatcttcagcccaaacttttgctaaatgaaatggaaaaataact

SEQ ID NO: 14713 - DNA, 415 bp, Bos taurus
  Clone ID: 63-LIB2809-016-Q1-E1-H4
gggcccgggctacctgaaatgtcatatgccctgcagccatgacagtcatgagtccttcctgccacacggcagcccctggccagggtgtgcggctcagggagcacttcagaaaggagccgtcacacaaacagccattccttctactcctccacccgacggctaccccttggtccccagcccctcctcctggtgtcgctccgctcctgctcgtcacatcaggacatgtccttacacaactacgggactcccctagagtcagctgctggccaccgtgagcctgatgccagactctggcccactcagcctcccctgcttctcttccatcccatttgggggagaaggtgggtgcctgagccggtgccccgtgaagtggacacacacccccccaaagcagaggccggcactggcccctctg

SEQ ID NO: 14714 - DNA, 399 bp, Bos taurus
  Clone ID: 63-LIB2809-018-Q1-E1-H4
cgggataggcccgcctggaaaatcacatggacgaaggagcctggtaggctgcagtccatggggtctcgaagaatcggacacgactgagcgacttcactttcacttttcacttttcatgcattggagaaggaaatggcagcccactccagtgttcttgcctggagaatcccaggggcaggagagcctggtgggctgacgtctgtggggtcacacagagtcggacgcgactgaagcaacttagcagtagcagcagttagcccattatccacagtgcagatctaagaaaggtctttcagcagctcctcatcactttttgggccaagtgtaacatccctggtcagcacccctaaggctttccctgatctgggcctgactatgtctccattatcatcaccccaa

SEQ ID NO: 14715 - DNA, 370 bp, Bos taurus
  Clone ID: 63-LIB2809-022-Q1-E1-H12
ggctgccggcgggacaaggatggctattactggatcactggcaggatcgatgacatgctgaacgtatctggacacctgctgagcacggcagaggtggagtcagcactcgtggaacacaaggctgttgcagaggcagccgtggttggacaccctcatcctgtgaagggcgaatgcctctactgctttgtcaccttgtgcgatggccacatcttcagcccagctctcactgaggagctcaagaagcagattagagaaaagattggccctattgccacaccggattacatccagaatgcacctggattgcctaaaactcgctcaaggaaaatcatgaggcgggtgcttcggaagatcgctcagaatgaccacg

SEQ ID NO: 14716 - DNA, 371 bp, Bos taurus
  Clone ID: 63-LIB2809-023-Q1-E1-H4
cgccatgggcccactgttgaattaaaagcgccatcagggacatcgagcaagggtcaaaaatccagagcgccattcatgcacccctggaaattagcccttacatgtccattgtcactacatgggccaagggctcaaagatgagttagcttcaagggggtacaaagaagcataacgaggtagccacggggcagaggagttccaggaacagaaagaggacataagcatcacagacagcacgtgttcacaacttctcacagagccactgatccagcttctcagaacagagtgctttatgggccaaccagtagttaattcctactttatccagaatcttcttgacacacataatgtcatcagtaagatcatcatcc

SEQ ID NO: 14717 - DNA, 364 bp, Bos taurus
  unsure (351),(354): unsure at all n locations; Clone ID: 63-LIB2809-024-Q1-E1-H12
acagcaaaaaggcctgaatgggcatatctctctggggatagggcactgctttctggggaacaggcaggactttggactgagaaagggacagcacggactgaggaggaaacatgacagttggaggaagaggctggtgaggctggtgcatccaagactggagcagaggaagaggaaggtgcagattttcaacatcagtgagagtcaggctctggctttcagtaaagggctcaactggatatttagggaagggcatttctttgtgcttaggagccatagcctccttcactttggagactcccattacttcaggctgaaggaaaggcggcaccaccacaggggtttgagtaaganganggatgttttg

SEQ ID NO: 14718 - DNA, 389 bp, Bos taurus
  Clone ID: 63-LIB2809-025-Q1-E1-H12
gtctgtaatgcatcatgcatccaacgggtcaataccttccggaggcggaaaacaatccttgaaaaacgggggcaaggcaaattccgggaaaccctggtggattttttccaaaaaattaaggcaatcctttcctcctcagtcaatttagttttcctagtgaatacctctgttgattccatgtcaacggtcttctttgaattttcctcactggtggatagctgctctctgttcagagtgggagtaatgggaacagcatttctcttaacctgatcccatgggttcaaaacaattggaccttgatacagatactggagatactgggggaacttctgataaaactgattgatttcattcagtgctttctggtagtgcttatcgtccacagtaat

SEQ ID NO: 14719 - DNA, 384 bp, Bos taurus
  Clone ID: 63-LIB2809-025-Q1-E1-H4
ttccatgggattttactagatgaaaaagatccacatacagaagaacaagcatttgtgaaaacagttaaagatcaagcttctgaaattcaggtgacaatgatgctcaccgaaagttgtaagctccgaggtcttcatcacagaaatcttcttcctattaccaatgtgtgtatagaagaaggagaaaagcccatggcgatattgccttacatgaattgggggaatcttaaattgtttttacggcagtgcacattagtagaggcgaataatccgcatgcaatttctcaacaagacctggtccacatggctattcaaattgcctgtgggatgagctatctggccagaagggaagtcatccacaaagacctggctgccaaggaatgggtc

SEQ ID NO: 14720 - DNA, 419 bp, Bos taurus
  Clone ID: 63-LIB2809-027-Q1-E1-H12
cccaaagtctcggcaacgctgtaagttgatagcagccaggtcaaagccgtggatcttgtgagtgggctggaaaagcttgttgcgcagctcactcgtcaccattttatcctgattcatcagtttggacttcttggccagcagaccccgcaccagagggtcaattccaccgtctttgattatcctccaggtgttgaagaagagggtgtgtatggggagctctgcttccggaccccatggctggtaattctcatccaggcgggacacagtggagggaacctccatgtggccaaagcggaaggcaaaggtgaagacattggaaattcggggatccacagagttattatagccttggtatggcaggattcacttctgcatctcactacctagcacaatgggtacgtagtccctaaaggtgatga

SEQ ID NO: 14721 - DNA, 389 bp, Bos taurus
  Clone ID: 63-LIB2809-027-Q1-E1-H4
ggataaattgtattttttcattcgtagaaatagtacataattattaaatagcagaacttgcttaaaaacaaggatttgcggacaatgtaaaattctttcattatattactcttgtggtaacatatttatctaattatgatatttaagctttcgtgttttataattgaactttgattgtttggcacttaggccaaattctaaatcaaaatgaatttacaacttgatgcctttgaagactcaagattaccaccttctaccaagagaagtagtgctagaagttggccattgttaaggaactccttgaattaaaaaaacacatattaagacttagttttcattaaaacaaacaaaaataaacctcagagtaacttttaaagtccttttaaaat

SEQ ID NO: 14722 - DNA, 449 bp, Bos taurus
  unsure (409),(414): unsure at all n locations; Clone ID: 63-LIB2809-030-Q1-E1-H4
ccgggagacagcagaaaggcctaaatgggcatatctctctggggatagggcactgctttctggggaacaggcaggactttggactgagaaagggacagcacggactgaggaggaaacatgacagttggaggaagaggctggtgaggctggtgcatccaagactggagcagaggcagaggaaggtgcagattttcaacatcagtgagagtcaggctctggctttcagtaaagggctcaactggatatttagggaagggcatttctttgtgcttaggagccatagcctccttcactttggagactcccattacttcaggctgaaggaaaggcggcaccaccacaggggtttgagtaagaggagggatgttttgtgggaagctgttatggatgggcccaaagggaaggatanactanagactgtgtctgggcaaaggggtggattttatcct

SEQ ID NO: 14723 - DNA, 333 bp, Bos taurus
  Clone ID: 63-LIB3057-001-Q1-K1-H4
tcgtcgaagggaaagaaggccaaggggtagaatgtggccccggccccggccgtggtgaagaagcatgaggccaagaaagtggtcaaccccctgttcgagaagaggcccaagaattttggcattggacaggacattcaacccaagagggacctcacccgctttgtcaaatggccccgctacattcggctgcagcggcaaagggctattctctataagcggctgaaagtgccttctgcaattaaccagttcacgcatgccttggaccgacaaacagctactcaactgcttaagctggcccacaagtacagaccagagacaaagcatgagaagaag

SEQ ID NO: 14724 - DNA, 385 bp, Bos taurus
  Clone ID: 63-LIB3057-002-Q1-K1-H12
accgacgcgtccggaaaaacctgaaaatgatcctgagtggtggaaatgcaggaagatcaatggaatggtgggtgtggtgccaaaaaactatgttaccattatgcagaataacccattaacatcaggtttggaaccatcgccttcacagtgtgattacattaggccttcacttactggaaagtttgctggcaatccgtggtattatgggaaagtcaccaggcaccaagcagaaatggcattaaatgaaagagggcatgaaggtgatttcctcattcgtgatagtgaatcttcgccaaatgatttctcagtatcactaatagcacaagggaaaaacaagcattttaaagtacaactaaaagagactgtctactgcattgggcagctt

SEQ ID NO: 14725 - DNA, 414 bp, Bos taurus
  unsure (346): unsure at all n locations; Clone ID: 63-LIB3057-002-Q1-K1-H4
ccggggagaggctcgagcaggcgcgcggccccgaggcccaggctgagagtgcggccgggcgggctgagctggagtatggcctggtggcggaggcggaggctgaggcggccgagaagaaggactcggggccctataagatggaacacttccgctggggcagcccgcccaaggacaagcgctacggtgggttcatgacctccgagaagagccaaacgccccttgtcacgctgttcaaaaacgccatcatcaagaacgcccacaagaagggccagtgagggcgcagcgggcaggggtctctctccgcggaaagttgaccccgaaggcctctcttctgccctcctgccgnctcgcagcctgggtgaagattcgcccaggcagtgatggcgccaggtatcccgactcttaaagctgtct

SEQ ID NO: 14726 - DNA, 373 bp, Bos taurus
  Clone ID: 63-LIB3057-004-Q1-K1-H4
cggacgcgtgggtagatcgcgagcggtcgccctttttttttttttttttttagcatgcctgggttttccttctttattgaatgacttttcaagatgtaatcacaattgaaggtgacgcgttagaagggagaggtgcgcgttgaaggcataaggctgctcgtagacccggctccagagacaggtggccggaaaggaacaaggattaaaaaaaggctgagcgtgtgtgtcgctcatggggacgggcgcgtgggtgcagctcggctggacggcccttggtggcccccaggagaggcctggctgagcaagcagagcccccaagcagcagaggggggccctgccctgcagtccccacggcccactcacacgcccctac

SEQ ID NO: 14727 - DNA, 420 bp, Bos taurus
  unsure (155),(174),(294),(399): unsure at all n locations; Clone ID: 63-LIB3057-005-Q1-K1-H4
aaaccttggccccccattaaaggaaaacagaatgtgatcatgtttgatggaattgcaagggagtggtaaaacaactacatgttcaaagttagcatattattatcagaggaaaggttggaagacctgtttgatatgtgcagacacattcagagcangggcttttgaccaactaanacagaatgcaaccaaagcaagaattccattctatggaagctatacagaaatggatcctgttatcattgcctctgaaggagtggaaaaattcaaaaatgaaaactttgaaattattattgntgatacaagtggccgtcataaacaagaagactctttgtttgaagaaatgcttcaagttgctaatgctatacaaccagataacattgtttatgtgatggatgcctncattggacaggcttgtgaagc

SEQ ID NO: 14728 - DNA, 404 bp, Bos taurus
  unsure (336),(374): unsure at all n locations; Clone ID: 63-LIB3057-006-Q1-K1-H12
acgagaaccaggagagaactcggagatcctagccaccctcaagtatgttcgaccaggtgggggcttcacccccaatttccaactgtttgagaaaggcgatgtgaatggggagaaagagcagaagttctacacgttcctgaagaactcctgtcctcctacctcggagctcctaggctcacctgaccgccttttctgggaacccatgaaggtccatgacatccggtggaactttgagaagttcctggtggggccagacggcatccccatcatgcgctggtaccaccgcaccacggtcaactctgtcaagatggacatcctgacctacatgcggcggcnggcggtctgggaggccaaggggaagtaactgaggcccnaccgcccttcccccaagtccaccacacggg

SEQ ID NO: 14729 - DNA, 436 bp, Bos taurus
  Clone ID: 63-LIB3057-006-Q1-K1-H4
agtgtgtttcttgaaatcatcaccaccatggacagcaaaggttcgtcgcagaaagggtcccgcctgctcctgctgctggtggtgtcaaatctactcttgtgccagggtgtggtctccacccccgtctgtcccaatgggcctggcaactgccaggtatcccttcgagacctgtttgaccgggcagtcatggtgtcccactacatccatgacctctcctcggaaatgttcaacgaatttgataaacggtatgcccagggcaaagggttcattaccatggccctcaacagctgccatacctcctcccttcctacccctgaagataaagaacaagcccaacagacccaccatgaagtccttatgagcttgattcttgggttgctgcgctcctggaatgaccctctgtatcacctagtcaccgaggtacggggtatgaaag

SEQ ID NO: 14730 - DNA, 406 bp, Bos taurus
  unsure (25): unsure at all n locations; Clone ID: 63-LIB3057-007-Q1-K1-H4
gaatttgataaacggtatgcccagngcaaagggttcattaccatgggcctcaacagctgccatacctcctcccttcctacccctgaagataaagaacaagcccaacagacccaccatgaagtccttatgagcttgattcttgggttgctgcgctcctggaatgaccctctctatcacctagtcaccgaagtgcggcgtatgaaaggagccccagatgctatcctatcgagggccatagagattgaggaagaaaacaaacgacttctggaaggcatggagatgatatttggccaggttattcctggagccaaagagactgagccctaccctgtgtggtcaggactcccgtccctgcaaactaaggatgaagatgcacgttattccgctttttataacctgctccact

SEQ ID NO: 14731 - DNA, 352 bp, Bos taurus
  Clone ID: 63-LIB3057-008-Q1-K1-H4
gcgatgcgtacattcgcgagcggtcgccctttttttttttttttttaatagttaagagattttattgtaatagctgtaattacagtgcttgtttgtcgaaatgaaaactgaaaacaagtatacaaaacagttgattactaattgtgtactgaaagcagtaagaggttccacgacaccaaataaaccagctctgaggttttccccaagataaagtttaacagctccagcttcttcagtgtttatcaaaatacaaaagaaagaagtagaggttatcatcttcaatggcaaatctggcccttgcaggctgaaggggtgaaagcacatgtggacaggggctcttgagggctggggc

SEQ ID NO: 14732 - DNA, 423 bp, Bos taurus
  Clone ID: 63-LIB3057-009-Q1-K1-H4
ctacgaatggtttagcaccaggcgcctcacgaacgtgcggtgcgtgacgggcgagggggcggccgcctttccggccgcgccccgtgtcccgggacgaagggctctccgcaccggaccccggtcccgacgcgcggcgggggcgcgccgcgccgcgccccgggggacgcgggcgacggcccgccggcggggacggcgggggaccggctatccgaggccaaccgaggctcccgcggcgctgccgtatcgttccgcctgggcgggattctgacttagaggcgttcagtcataatcccacagatggtagcttcgccccattggctcctcagccaagcacatacaccaaatgtcttgacctgcggttcctctcgtactgagcaggattaccatggcaacaacacatcatcagtagggtaaaactaacct

SEQ ID NO: 14733 - DNA, 348 bp, Bos taurus
  Clone ID: 63-LIB3057-010-Q1-K1-H12
ggagggggctatttaaagggcctgggaggaagagagcccagagggagtgagcagtcatcatggccacttcagagctgagctgcctggtgtcagaggagaactgtgagcggcgagaggccttctgggctgagtggaaggatctgacgctgtccacaaggcctgaggaggggtgagtgctggccagtcaggggtcccccatcctctcagagcacctttcctgagactcatgagaccagagcacaaagcctgggagaggttttgggggtgggggccaggagagtgcctgctggggaaagtggagttgccccttcagcagccccagggagctctgctgcccctctggtgagt

SEQ ID NO: 14734 - DNA, 449 bp, Bos taurus
  Clone ID: 63-LIB3057-010-Q1-K1-H4
acgatcgcgagcggccgccctttttttcttttttgttctatatttctaactttcgggctttggttttttttttttggagtatacgttctgctttaatatattgtttgcacatatatagatatccaggggaaaaggtaatgccacatgaagtattgagaacacaactgtgctttaatttaagtgttgagtttctaaatgtggcagcaatcacacttctaagcaagcaatgtccactagctcgcaaacacatttgatggtgatattagaacagtaaacttcatactgtaaaacatgttaaatacctcttctgtacattcatggtatgttgtgtctgtgtcttttcacaaaaaagaggcatctctagattttgtaatcagagtcagcttcatgaagacttagatatgaaatagtgcttctcaattagtttctccaactaatttttttaaaaa

SEQ ID NO: 14735 - DNA, 357 bp, Bos taurus
  Clone ID: 63-LIB3057-011-Q1-K1-H4
ggctgcggtggtggcagcaggggcagcagcgggggcagcagccacaggggcagcatccggaaaggcagatggatcagccaagaaggccttgaccttttcagcaagtgggaaggtgtaatcagtctccacagacaaagccaggacgcgcttgtacccattgatgatagaatggggtacagatgcgacggttgggtaaccaatctgcaggcacacgctggcaacattgcggacgccctccaggaagcgggaatgcagagtctcctctgtgatggcaagcacttcaaggttgtagatgctgccattgtcaaacacctgctggatgaccaggccgaaagagaatggggagatgttcaacat

SEQ ID NO: 14736 - DNA, 397 bp, Bos taurus
  Clone ID: 63-LIB3057-012-Q1-K1-H4
ccgcggctggacccacgcgtccaggggcgctgcagccaccggcggcccagttgcttctctggtggagtcgggtgggccctggtcttgggggacttttccagttcggcctttcgaaacgtctgcacgcggaaaccaaccgccaggaaagaagcgcggggtcgagccgagctaacctgaggaaaacggtgccgcttgagccgagcgcgtgggcccgccggggcattagttcgtctgcgcgcagccccgggccgacttttcagagccatgagttacggtcgcccgccttccgatgtggagggcatgacctctctcaaggtggataacctaacctaccggacctcacccgacaccctgaggggcgtgttcgagaagtacgggcgcgtcggcgatgtgtaca

SEQ ID NO: 14737 - DNA, 326 bp, Bos taurus
  Clone ID: 63-LIB3057-013-Q1-K1-H4
atcgtaatcagccggacgacatgaaacttttcacccgtattaataaatctaatggggggtttcccagtgaacaggcggagagtggaggccgcccgccgagcccaggagctagagatggagatgctctccagcaccagcccgcctgagaggacccgatacagccccatgccccccagccaccaccagctgacccttcccgacccattccaccacggcctgcatagcacacccgacagccccgcaaagccagagaagaacgggcatgccaaagaccaccccaagattgccaagatctttgagatccagtccatgcccaatggcaaaac

SEQ ID NO: 14738 - DNA, 334 bp, Bos taurus
  Clone ID: 63-LIB3057-014-Q1-K1-H12
cgcgagcggccgtccaattacttccatgacttttcttggaaatttacggatttgtaaaggttgccaaggcaagggtcattaccatgccttacactgcatactctccttctaccctgagaataagacaagcccaacagacccaccatgaagtccttatgagcttgattcttgggttgctgcgctcctggaatgaccctctctatcacctagtcaccgaggtgcggggtatgaaaagagccccagatgctatcctatcgagggccatagagattgaagaagaaaacaaacgacttctggaaagcatggagatgatatttggccaagttattcctgg

SEQ ID NO: 14739 - DNA, 227 bp, Bos taurus
  Clone ID: 63-LIB3057-015-Q1-K1-H4
cgagagggacggtagcccgttccccgttggcctcaaggaggagaaggggggtcacccgtttcgtttccttaaacacctgggcaccccaccccaccccctctgacgctacaccgcgactagtatgaagtccgctgcggcgagccttgaagcctaagtcgcgctcccgactggagcctcctcatgttcaaatctttttattagcatcatatattcatactagaactttt

SEQ ID NO: 14740 - DNA, 430 bp, Bos taurus
  Clone ID: 63-LIB3057-016-Q1-K1-H4
ctctatactgtggttcctcgcctggtcaagtttgtggatattttgaccaattggtatgttcggatgaaccgtagaagattaaagggtgaaaatggagtagaggattgtgttaaggccctggagaccttgtttagtgttctgctgtctttgtgcagacttatggccccctataccccttttcttactgaattgatgtatcagaatctgaagacactgattgaccctgtttctgtccaggacaaggacacattcagtattcactacctcatgctgccccatgttcgtgaggaattgatcgacaagaaaactgagagtgcagtatctagaatgcagtctgtgattgaacttggccgagtgattcgagaccgcaaaactattccaataaagtatcctttgaaagaaaatgttgttatccatcaagatcaggaag

SEQ ID NO: 14741 - DNA, 278 bp, Bos taurus
  Clone ID: 63-LIB3057-017-Q1-K1-H4
tctcccagaatatcccctttcccctcctaagaagaaggatctgggcctggaggaaattcggaagaaattagaagctgcagaggaaagactcaagtcccatgaagctgaggtcttgaagcagcttgctgagaatcgggagcacgagaaagaagtgcttcagaaggcgatagaggagaacaacaacttcagtaagatggcggaagagaagctgacccacaagatggaggccaacaaagagaaccgagaggctcatatggccgccaagctggagcgcttgc

SEQ ID NO: 14742 - DNA, 408 bp, Bos taurus
  Clone ID: 63-LIB3057-021-Q1-K1-H12
ggcgagaggaccagcggagacacctctccggagtcttaggctgcagagtctaagacttagagagaggggccccggaggagacggactttcccaccccttttcccatcccttctttatgcccagagaggcaagcagaggcgcggagctttagaaagttgagtggtcaggaaggtaggtgcttccctttttcccctcgagccgaggtggggctgggaccgccggacccagcttcttccctcgcgaggggcacctttttcggctctagcggccgatgcgcttcggagctgctctctgcagagccagagggtgggtcggattcgccgagtgtgcgtgaggatggatcgtagatcccgacctcagctagggcgccgagctcgccacaattacaacgatctgtgcccacccata

SEQ ID NO: 14743 - DNA, 330 bp, Bos taurus
  Clone ID: 63-LIB3057-021-Q1-K1-H4
gtttgccgccgggacacaggtgtcgtgaaaaccaccgttaaacctaagccaaaatgggaaaggagaagacccacatcaacatcgttgtcattgggcacgtagattcagggaagtctaccacgactggccatctgatctataaatgtggcgggatcgacaagagaacaattgaaaagttcgagaaggaggctgccgagatgggaaagggctccttcaaatatgcctgggtcttggacaaacttaaagctgaacgtgagcgtggtatcaccattgatatctccctgtggaaatttgagaccagcaagtactatgttaccatcattgatgccc

SEQ ID NO: 14744 - DNA, 424 bp, Bos taurus
  Clone ID: 63-LIB3057-022-Q1-K1-H4
cgcggcgctgctactcgagctccgagaggcccacgggcggcgtccaccatgttgtcgggagcggggtgcagcacgagcaggagactggtgccggccctgagcgtgctgggctcccggcagaagcacagcctccccgacctgccgtacgactacggcgccctggagccgcacatcaacgcgcagatcatgcagctgcaccacagcaagcaccacgcggcctacgtgaacaacctcaacgtcgccgaggagaagtaccgggaggcgctggagaagggtgatgttacagctcagatagctctgcagcctgcgttgaagttcaacggtgggggccatatcaatcacagcatcttctggacaaatctgagccctaacggtggtggagaaccccaaggggaattgctggaagccatcaaacgtgactttg

SEQ ID NO: 14745 - DNA, 340 bp, Bos taurus
  unsure (86),(284): unsure at all n locations; Clone ID: 63-LIB3057-025-Q1-K1-H4
ctcccgcgcacagattgatggataacaactcttatccgcgtttcttggagtgggaatgctaccaagacttgtgtaaaaagccgcanatcaccacagaaccccatgccacatgagatgaaagcgggagcccagaaatgggggacttttcattttttttcctaaggggaaaggctgtcacctgccgaaaagactgaccttgaattcagcctgggtgttcaggaaacatcactcagaactattgattcagagctgggtagtgaatcaagaaaccggtcgccacgtangagaaactggtactggggcagcttccgtaactgatggaacacagagagagagtgtg

SEQ ID NO: 14746 - DNA, 363 bp, Bos taurus
  Clone ID: 63-LIB3058-001-Q1-K1-H4
atgcgttcgggcgccgccatcttataagccatcttttattttttttgaaaggtttaaacaatttattttgtcccaaaaatggagaccggagaaaaagccacgcgcgttcccgcgccattacccggcgcgcgcccggaggcgggaagggctgcgccgccgtggcgtcctcgcgcgcagggccggtgcgggcaggcgcaacccggccattggcgccccggagccggttaccaaggcgacagcccaggccaagcgcgagagccaataagggcgtcgccagggccgtttcaaaaatctaaagcaaacaataatcggggaaaaaaaaaggaaaatactcccacgttgggggattggcatgccaggacg

SEQ ID NO: 14747 - DNA, 324 bp, Bos taurus
  unsure (303): unsure at all n locations; Clone ID: 63-LIB3058-006-Q1-K1-H12
cgtgctgtccttctggcggggcaacctggccaacgtcatccgctatttccccacgcaagcgctcaacttcgctttcaaagacaagtacaagcagatcttcctggggggcgtggacaagcgcacgcagttctggaggtactttgcgggcaacctggcctccggcggggcggccggggccacttccctgtgcttcgtctacccgctggatttcgcccgaacccgcctggcggccgacgtgggcaagtcgggcagtgagcgcgagttcaggggcctgggagattgtctggtgaagatcaccaagtncgacggcatccgcgggctgta

SEQ ID NO: 14748 - DNA, 169 bp, Bos taurus
  Clone ID: 63-LIB3058-006-Q1-K1-H4
cagacgcatgagcccaggcctgagaagccgatctgtaccccacctcttcaagcagcctgagctcagaggcaaagtgtagctatgagcctaacatttactgttctgaacccatcaagccagacagctactttgtgggcacttcacactctatgactgaacgtatgaataa

SEQ ID NO: 14749 - DNA, 294 bp, Bos taurus
  Clone ID: 63-LIB3058-008-Q1-K1-H4
gagccacgcgtccggcatgaagaagatatccgtctcatatacacctttgatcaggccacaggtggaacaacacagtttgaagcacactcggatgcccaggttttggttctcttagatgtcacccctgaccagtcaatggtggatgaaggaatggctcgggaagtcatcaatcgtatccagaaacttcgcaaaaagtgtaatctggttccaactgatgaaataacagtttattataaagcaacttctgagggaaaatatctgaataatgttatcgaaagccacacagacttcata

SEQ ID NO: 14750 - DNA, 415 bp, Bos taurus
  Clone ID: 63-LIB3058-009-Q1-K1-H4
ctcccttttcatggggtcaaggaacatcccagcccaccttctccccgttggccacccattgataaggaccgcgggttgtgaatgagcgtcttgcctctgcattagctcattggccaaaggaagactcccctttctgtgaattccaaagtccgcgccttaggactccagtgctgtcatcaccaaagcccctgtgcttctcgtggtccgccaagtgatcctgtggctgcagcttccacatttcagcgtgtgctctccaggccacgcagagttaatcgagtttgtcttttgagctgaatctccttcctctcatggatctttgaggaagacatgaagtcccgtacccagtgggccgctcacgccttagagcagcgtagcttctctacttacctggtgcagaaacagtcaagagaaatct

SEQ ID NO: 14751 - DNA, 406 bp, Bos taurus
  Clone ID: 63-LIB3058-010-Q1-K1-H12
gaaggaggaggaggagctgtttcccgagtcggagcggccggagatgctgagtgagcaggagcacatgagcatctcaggaagcagcgcccgccacatggtgatgcagaagctcctccgcaagcaggagtccacagtgatggttctgcgtaacatggtggaccccaaggacatcgacgatgacctggaaggggaggtgactgaggagtgtggcaagtttggtgctgtcaaccgtgtcatcatctaccaagagaagcagggcgaggaagaggacgcggagatcattgtcaagatttttgtggagttttccgtagcctctgagactcacaaggccatccaggccctcaatgggcgctggtttgctggccgcaaggtggtggctgaagtgtatgaccaggagcgttttgat

SEQ ID NO: 14752 - DNA, 434 bp, Bos taurus
  Clone ID: 63-LIB3058-010-Q1-K1-H4
acggaagacgtgggttccaacaaaggagccatcattgggctcatggtgggcggtgttgtcatagcgacagtgatcgtcatcactttggtgatgctgaagaagaaacagtacacatccatccatcatggagtggtggaggttgacgctgctgtgaccccagaggagcgccacctctctaaaatgcagcagaacggctacgataacccaacttacaagttctttgagcagatgcagaactagaccaccgtcgcagcagcctctgaaattggaagcaaaaccattgctttaccacccatcggtgttcatttagagaataacgtggagaaaaagcaacccttctggtttattatttactcattatcgcctttcaacagctgtgctgtacccaagtagatgcctgaacttgaataatatacgaatcagaatggattctc

SEQ ID NO: 14753 - DNA, 367 bp, Bos taurus
  Clone ID: 63-LIB3058-011-Q1-K1-H4
atcagatgtgtatggactcagaaaaacacatgatctacacctttggtggtaagatcttgacatgtaatggccgtgtatacgacagcatatccagctaaccgaatgtcagtggattggacgctttcaactgtcaatgtcaaacctgtaaacttctttgagaggactcctgtaatagctggtcctgaggacattcagtgtcgtataggacactgtatgctattccactgaaagcatcgttgcttatatgtatttgatgggcatcgatcgatgacctatatggatgacttatttaatcatgatgtggactctgatcatcgtgacatagtatccgaaggtaccaatatagactgtgtaatggtggctatga

SEQ ID NO: 14754 - DNA, 167 bp, Bos taurus
  Clone ID: 63-LIB3058-012-Q1-K1-H4
cggacgcgtgggattgagaaacgcatcgtgatcacaggagatgcagatattgatcatgaccaggcgctggcccaggccataacggatgccacggagcagcaccccgacatgtcggtcacgagggtggtggtgcacaaggaaaccgagttgaaggagggggaagagta

SEQ ID NO: 14755 - DNA, 370 bp, Bos taurus
  Clone ID: 63-LIB3058-013-Q1-K1-H12
gccgtggtcaggatggcggaagagcaggagttcgcccgtctctgcaagttgcccacgcagccctcccacccgcactgcgtcagcagcacctaccggagcgcccagcactcccaggcgctgctccgggggctgctggccctgcgggacagcggcatcctcttcgatgtggtcctggtggtggaggggaagcagctcgaggcccaccgcatcctgctggccgcctactgcgactacttccggggcatgttcgctggggggctgaaggagatggagcaggaggaggtcctgatccatggcgtgtcctacaacgccatgtgccagatcctgcacttcatctacacgtccgagctggagctcagcctgagcaacg

SEQ ID NO: 14756 - DNA, 397 bp, Bos taurus
  unsure (148): unsure at all n locations; Clone ID: 63-LIB3058-013-Q1-K1-H4
gacccagactcgggcagtgatgaaaccccgctccagaaccccacctgcagggcatggagcccccggcgcccgtcagcatcctcggccgcttccccttcctgtcggcgctgcagcgcatgagcgtggtggtggcctggccaggcgccgnccagcccgaggcctgcgtcaagggctctcccgagctggtggccagcctctgcgaccccgcgacagtgcccgtggacttcgccctgaggctgcagagctacacggccgcgggttaccgcgtggtggcccttgccggcaagccgctgcccgtcacggccagcctggaagccgctcagcaactgcccagggacgctgtggagcaggagctgagtctcctggggctgctggtcatgaggaacctactgaagcc

SEQ ID NO: 14757 - DNA, 355 bp, Bos taurus
  Clone ID: 63-LIB3058-014-Q1-K1-H4
ctagttctagatcgcgagcggccgccctttttttttttttttttttttttttttttgggttttggttttttttttttttttttttttttttttttttttttttttttttttttttttttttttttttttttttttaaaagggggccgccagggaagttttttttgaaaaaaaaccctggggaaagctctgggtttcccaagggtaaaacccccttaccccccccgggcccttaaagggccacccccttttttggggaattcccccggggggggggtcttccccttgtgaaaccgggtttcagttttggttttttagcccccggggtgaaatttttcaacccgggttttccccccc

SEQ ID NO: 14758 - DNA, 321 bp, Bos taurus
  Clone ID: 63-LIB3058-015-Q1-K1-H12
gttctagatcgcgagcggccgccctttttttttttttttttttgcatgaatgtacatagcagctttattcataatagccctaaactgaaaccacccagatatccttccacaggtgaaggttgaacaaaggtacatccatatcacaaactactaattagcaataaaaaagaactacagatacaggaaacaacttggatgaatgtcaagagaattttgctgagtgggcaaaaaacccaacctctaatgatcacataccatacaattctatttctgtaacgttctcaaaatgacaaaattcagaaatggagaacagatttgtga

SEQ ID NO: 14759 - DNA, 336 bp, Bos taurus
  Clone ID: 63-LIB3058-016-Q1-K1-H4
gacccagcgtccggcaaacggactctgtcaaatagagacagaaagaaagggatgcagaactggcttcctgcccccacatcccgtcccggccttctggggaaggagcaaaatccccaaacaaagcaaccagcacaattctgaaggggcctgtgcactaccctgaccctttccaggggaaccccacccttgactgcagccggagcttcacttgggagctcagaggaccagcttgtaaagatgatggggtgcagatccccagagctctcccctgcagactccaccccctctctccctacctccccggcttatctctggcttcttggcctggactgggtg

SEQ ID NO: 14760 - DNA, 435 bp, Bos taurus
  Clone ID: 63-LIB3058-017-Q1-K1-H4
acgccacgcagtccggctgatggccctgggggagggccctggtgcggagggtccccgcctggcttcacccagtggcagcaccagctcaggtctggaggtggtggctccagagggcacctcagtcccagctggtggcccaggttccctggatgacagtgccaccatctgccgtgtctgccagaagccaggtgacctcgtcatgtgcaaccagtgcgaattctgcttccacctggactgccacctgcctgccctgcaggatgtgccaggggaggagtggagctgctctctttgccacgtgctgtctgacctggaggaggaggatggcagcctgaacctgtatgggggggatagtaccggagtggtggccaagctctcaccagtcaaccagcagaagtgtgagtcgcgtgctgctggccctcttttggcacgagccct

SEQ ID NO: 14761 - DNA, 419 bp, Bos taurus
  Clone ID: 63-LIB3058-018-Q1-K1-H12
gaaccactgctgtgggaactatttctccaggcagggccagtagtgaacacgcacatgccaaaagatagagtcactggtcagcaccaaggctatggctttgtggaattcttgagtgaggaagatgctgactatgccattaagatcatgaacatgatcaaactctatgggaagccaatacgggtgaacaaggcatcagctcacaacaaaaacctggatgtgggggccaacatttttattgggaacctggacccagagattgatgagaagttgctttatgatacttttagcgcctttggggtcatcttacaaacccccaagattatgcgggaccctgacacaggcaactccaaaggttatgcctttattaattttgcttcatttgatgcttcggatgcagcgattgaggccatgaatgggca

SEQ ID NO: 14762 - DNA, 307 bp, Bos taurus
  Clone ID: 63-LIB3058-021-Q1-K1-H4
ctacgacgtacgcgtccgattatagatctcgagctgtcgacattaagatttatcagtcccactctatctctaatcgagaagcggttttattacagcgtgaaaggtcatcatcactgcctatctacattccagcttcaaatgattaactgctacctctactactggactattgtattcatataatatcctcaattctgtacctatcagtaacaagatacattttcttctagcgtacaattaacttagtgcctcctaatactcttacactagcagtcaataaacataatcgatctttaacaatttattg

SEQ ID NO: 14763 - DNA, 431 bp, Bos taurus
  Clone ID: 63-LIB3058-025-Q1-K1-H4
cagcagtgatggcaacagctcacaactcaataaatggtgatatctgagactcactcatggctgatcgtcctctcagcttccccttgaaaaggaagcctagagtaggaccaccccagacaccacaggatagaagggagacatggggggaggggcggtggagatgagggatggggaaggcaccaggaccagcgtgcggggacacacacgcacacacgcacgcacaggcaaagaccaggggtgtccatctctgctccaaccggcggccgcgagaacatcacggaaggaccaggcgtccaagagacatttcagtccttcctgtcatgaagcgtctgccgagaggggctgggccacgattactggtctctgccccacgcgttcggccacgcgttcgcaagatacacatacagtataaattcttagatgaagaattt

SEQ ID NO: 14764 - DNA, 387 bp, Bos taurus
  unsure (71): unsure at all n locations; Clone ID: 63-LIB3058-027-Q1-K1-H12
aggttttatttctgggatctctgttctgtttttgagatctgataccataaagctcctcagagagaacgtangcagaatatactttgacaaaatcatagcaatttttttttagatctgtccactaagggaaaaaaaaaacaaaaaaaaacaaatatgatctaattaaacttaaaagcttttgtacaactaaaggaaaccattgacaaaacaaaaacacaacctattgaacgggagaaaacatttacaaatgatacaataaagggttaaaatgtatcaacagttcatataaatcaattttaaaagcctaatttaaaaaatgagcagaagacttgaataagcgttttttcaaataagacatatagtgggcaacagacacatgaaatgatg

SEQ ID NO: 14765 - DNA, 428 bp, Bos taurus
  Clone ID: 63-LIB3058-029-Q1-K1-H12
gtggttaaggagggccccagactctccaagaaccagaagttctccgagcacttcagcgtacattgctgcccgccgttcaccttcctcaattccaaacgcgagatcgtggaccgcaagtacagcatctgtaaaagtggctgcttctaccagaagaaagaggaggactggatctgctgcgcctgccagaagaccagattgaaaaggaagaccaagccgacccctcggaagaagtgatggaggagtttcaagtgaacggtcggcctcagctcctggactcactgcttctcgacgcacgtgccctgggacaggtcacccggctttgaatatgacgcaggggccgccacctgctgatgtggccagagccgatgcccacagtccctgtggggcgggcgctgccgggcagcctgcctggaggtgagaggagacac

SEQ ID NO: 14766 - DNA, 459 bp, Bos taurus
  Clone ID: 63-LIB3058-029-Q1-K1-H4
ctcggaacaggctcacatcttctggtggaaagctgctaggaacacgatgagtctgcagtggactgcagtcgccaccttcctctatgcggaggtcttcgctgtgctgctgctctgcattcccttcatttctcccaaaagatggcagaagattttcaagtcccgccttgtggagttggtagtgacatatggcaacaccttctttgtggttctcattgtcatccttgtgctactggtcattgatgctgttcgtgagattcgaaagtatgatgatgtgacagagaaggtgaacctccagaacaaccctggggctgtggagcacttccacatgaagcttttccgtgcccagaggaacctctacattgctggcttttccttgctgctgtcctttctgcttagacgcctggtgactctcatctcccagcaggccacgcttgtggccttcacggaacccttaaaaag

SEQ ID NO: 14767 - DNA, 383 bp, Bos taurus
  Clone ID: 63-LIB3058-032-Q1-K1-H4
cgcgtgcgcagcacctactgccagaatccggcgttatgtttgccgccattccccgcgccgcttctgtcggcccattatttccccttctggtcctcctctccgcgccgcaagacagcagtggcctgcacaccaagggcgcccttcccctggatacaatcactttctacaaggtcattcccaaaagcaagttcgtcctggtgaagtttgacacccagtacccctatggtgagaagcacgatgagttcaagcgtctggctgaaaactcagcttccagtgatgatctcctggtggcagaggtggtgatctcagattatggcgacatgcttaatatggagctgagtgagaaatacaagctggactaagtagtactaccctatcttttt

SEQ ID NO: 14768 - DNA, 359 bp, Bos taurus
  Clone ID: 63-LIB3058-033-Q1-K1-H12
acattagaacgacgcgttacgagtcccatgacctgcgtgcaagaaccacgcatcccaaggcggacctcataagacttactgtggacccaagacatgagaagcctggtagaagcaccacagtgacgccaggacggtctatattcagactcagcagctgcacgcagtcatggccgacacattcctggagcacatgtgccgtctggacatcgactcaccatccattactgtccgaaacacctgcatcatattgaccatcagcccatttttacgagcagtggatacattgaaggagaagattatatctgtaatgaatgtggttcgatagaacatctcttatggaacccactagtaccactcat

SEQ ID NO: 14769 - DNA, 346 bp, Bos taurus
  Clone ID: 63-LIB3058-034-Q1-K1-H4
gacccacgcgtccgctagatcgcgagcggtcgccctttgaatataatccttcttttttttttttattgatggcctatttaaagggaatcagtctttattccccacttgggtggggcattaacaaattcaacatacaagggagcattacatattggaggttagcattacagcattatgcagtttcacacaattcatggtagctttttcgaattttttctttttttaaaatttgacacggttattttaatttttgagattcaattttacaagagaagaccccaggtaaagaaagaccaccacatttgaaaaagatccccgggaaggcaaagtgacttttgggggccct

SEQ ID NO: 14770 - DNA, 424 bp, Bos taurus
  Clone ID: 63-LIB3058-037-Q1-K1-H12
cgggcgcgtggggtcggaaggtttatgttgctcaatctgaggctaaggtcgtgtctcagtatcatgagctcgtggtccaagcccgggaagactttaaacgagagctggacagtattactccagaagtcttgccggggtggaaggggatgagtatttctgacctagctgacaagctgtctgccgatgacctgaatgccctgattgctcatgcgcatcgccgcattgaccagctgaacagagcactggccgaacagaaagccacagagaagcagcacattgccttagccttggagaaacagaagctggaggaaaagcgggcatttgactctgcagtagcaaaagcattagagcatcacagaagtgagatacaggctgaacaggacagaaaggtagaggaagtcagagacgccatggagaatgaaat

SEQ ID NO: 14771 - DNA, 399 bp, Bos taurus
  Clone ID: 63-LIB3058-040-Q1-K1-H12
gcagctggatcagcaccttattgacgggtacctgtctcacaccgagctggcgccactgcgcgccccccttatccccatggaacactgcaccacccgctttttcgagacctgtgacctggacaacgacaagtacatcgccctggacgagtgggccggctgcttcggcatcaaggagaaggacatcgacaaggacctcgtgatctaaagccatgcctcctcctgcagaaccagattctctctctttgaccttccccctcctgttttccccaatgtttaaaatgtttggatggtttgttgatctgcctggggtcaaggtgctaatatagacttaaacgaatacattaacggtgctaaacacagacattttaacccaagtcccgacattcttaggtgctactc

SEQ ID NO: 14772 - DNA, 287 bp, Bos taurus
  Clone ID: 63-LIB3058-040-Q1-K1-H4
cggacaggggccgcgcccaagcggggctcaagcaaggatggacaccatgcggccagaaccacccactatggctccctgccccagaaggcgcagcacggccggccccaagacgaaaaccccgtagtgcacttcttcaagaacatcgtgacaccccgcacacctcctccatcgcaaggaaaggggcgaggactgtccctcagcagatttagctggggggctgagggccagaagccaggattcggctatggaggcagagcgtctgactacaaatcggctcacaagggact

SEQ ID NO: 14773 - DNA, 196 bp, Bos taurus
  Clone ID: 63-LIB3058-043-Q1-K1-H4
gtccggctggagaaggagaaaagtgccccggattctttcaggactcttggtctttggggagcgacccagatcgactgagggaagagggaggaaaattccctggatccctgcagggttaatttattcaaaaaggaaatcgaaaaatactcaacatgcaaaaatcttgtggagaaaatgaaagaaaaccaccgaacat

SEQ ID NO: 14774 - DNA, 421 bp, Bos taurus
  Clone ID: 63-LIB3058-044-Q1-K1-H4
atcgtcgccatcaatgaccccttcatttaccttcactacatggtctacatgttccagtatgattccacccacggcaagttcaacggcacagtcaaggcagagaacgggaagctcgtcatcaatggaaaggccatcaccatcttccaggagcgagatcctgccaacatcaagtggggtgatgctggtgctgagtatgtggtggagtccactggggtcttcactaccatggagaaggctggggctcacttgaagggtggcgccaagagggtcatcatctctgcaccttctgccgatgcccccatgtttgtgatgggcgtgaaccacgagaagtataacaacaccctcaagattgtcagcaatgccttctgcaccaccaactgcttggcccccctggccaaggtcatccatgaccactttggca

SEQ ID NO: 14775 - DNA, 391 bp, Bos taurus
  Clone ID: 63-LIB3058-051-Q1-K1-H4
acgaagagctctttgacctcatcatcgaggtttcggtacggaggctataagcccaccgacgagcacaggaccgacctcaaccccgacaacctgcagggcggcgacgacctggatcccaactacgtgctgagctcgcgggtgcgcacgggccgcagcatccgcggcttctgcctccccccgcactgcagccgtggggagcgccgtgccatcgagaagctcgtcgtcgaagccctgtcgagcctggacggtgacctgtcggggaggtactatgcgctcaaaagcatgaccgaagcggagcatcagcagcttattgacgaccactttgctttacgataagcccgtgtctgccctgctggttggttctggcatgggcctgtactgggccgaagcc

SEQ ID NO: 14776 - DNA, 345 bp, Bos taurus
  Clone ID: 63-LIB3058-052-Q1-K1-H12
ctcatcgtcgtgcagaatgaggtgacggtcacggaggataagatcaatgccctcattaaagcagccggtgtaaatgttgagcctttctggccaggtttgtttgcaaaggctttggccaatgtcaacatcgggagcctcatctgcaatgtgggggctggtggacccgccccagcggccggtgctgcaccagcaggaggtcctgccccatccactgctgctgccccagctgaggagaagaaagtagaagcaaagaaagaagaatctgaagagtctgatgatgacatgggctttggtctttttgactaaatctctttagtaacacattgaataaaaagctgagctgtt

SEQ ID NO: 14777 - DNA, 397 bp, Bos taurus
  unsure (329): unsure at all n locations; Clone ID: 63-LIB34-001-Q1-E1-H4
ggtggacgacgcgtccgcacagggaccccgcagagtgggccacccctgacacgttcaatccagagcattttctggaaaatggacagtttaagaaaagggaatcctttctgcctttctcaataggaaagcggatgtgccttggagaacaattggccaggacagagttgtttattttctttacttcacttctgcaaaaatttaccttcaggcctccagagaatgagaagctgagcctaaagtttagagaaagcctgaccagctccccagccagctaccgcctctgtgctattcctcgggcctgaaattgtccagagagggaggagaagganagaaagaagaatgggcctgttcccctcaagatagagcacatgctcaggagtgagggagcagcactcag

SEQ ID NO: 14778 - DNA, 432 bp, Bos taurus
  Clone ID: 63-LIB34-002-Q1-E1-H12
gggtcggcccacgcgtcaggcaaagcacaccaatggatctctttgtagttctagtgatctgtctttctattttgattttcctttttctatggaatcagaggcatgccaaagggaagctgccacctgggcccactcctctcccaattgttggaaatattctgcagataaatattaagaatgtcagcaaatccataagcaagctagcagaagattatggtcctgtgttcactctgtattttggcatgaagcccactgtggtgttgcatggatatgaagcagtgaagcaagtcctgattgatcagagtgaggaattttctggcagaggtagtttaccagtggcagacaacatcaaccagggattaggaattgttttcagcaatggagaaatatggaagcaaactcggcgtttctccctcatggttttgaggaata

SEQ ID NO: 14779 - DNA, 233 bp, Bos taurus
  Clone ID: 63-LIB34-002-Q1-E1-H4
agaaggaccccaataagaatgtcatcttctcccctctgagcatctccatagccttggccttcctgtccctgggggctcatgaccacactgtgacagagatcctggaaggtctcaagttcaacctcacagagacccccgagacagaaatccaccagggcttccagcacctcctgcagacgttcaatcagcccagcaaccagctgcagctgagcgtgggcaacgccatgtttgtg

SEQ ID NO: 14780 - DNA, 312 bp, Bos taurus
  Clone ID: 63-LIB34-003-Q1-E1-H12
aaagtgtatcataagtgggaggcccccggcgcccccccgtttcccgcgagggggcggggcggggtccgccggccttgcgggccgccggtgaaataccactactctgatcgttttttcactgacccggtgaggccggggggcgagccccgatgggctctcgcttctggcgccaagcgcccggccgcgcgccggccgggcgcgacacgctccggggatagtgccaggtgaggactttgactggggctgtacacctgtcaaacggtaacgcacgtgtcctaaggccagctcaatggaggacagaaacctcccgtg

SEQ ID NO: 14781 - DNA, 253 bp, Bos taurus
  Clone ID: 63-LIB34-005-Q1-E1-H4
gcgagcggccgccctttttttttttttttcctgtactactatcactattctcaggtgggtttttgagaatgaatgtgcagagtttatgatgtgtgtcaagcatgcctcgatagccacaggctttacaagaattacctattgtttgcttctttggattgacatgcagatctgtttcaggattctcacactcaggacagagaacaaattttttaatgaatccatccaacatcataacctctatgtctctctcaat

SEQ ID NO: 14782 - DNA, 408 bp, Bos taurus
  Clone ID: 63-LIB34-006-Q1-E1-H12
aatcttgccaagtacatatgtgataatcaagatacaatctccagtaaactgaaggaatgctgtgataagcctttgttggaaaaatcccactgcattgctgaggtacaaaaagatgccatacctgaaaacctgcccccattaactgctgactttgctgaagataaagatgtttgcaaaaactatcaggaagcaaaaaaagccttcctgggctcgtttttgtatgaatattcaagaaggcatcctgaatatgctgtctcagtgctattgagacttgccaaggaatatgaagccacactggaggaatgctgtgccaaagatgatccacatgcatgctattccacagtgtttgacaaacttaagcatcttgtggatgagcctcagaatttaatcatacagaactgtgaccaa

SEQ ID NO: 14783 - DNA, 458 bp, Bos taurus
  unsure (26): unsure at all n locations; Clone ID: 63-LIB34-006-Q1-E1-H4
gcctgcacgaaccggccgagtcctcncgggtcgtcccacgcctccggcagcagcagcaggagtgtgaaggtcaagtggtcaggagcatggtagaccattgtgacctcatctccaaccatgagcagctgcccatgctgggccaacgccccggttccgaggatagcatgtgcagtcgtggagccctgtacacgggcttttccgtcttggtggctctgctcctggctggccaggccaccactgcctacttcctgtaccagcagcagggccggctggacaagctgacggtcacctcccagaacctgcagctggagaacctgcgcatggagcttcccaagcctgccaagcctatgagccagatgcggatggccactcccatgctgatgccggcgctgcccatggcaggtccagagcccatgatgaacgccaccaagttctgcagcatgacacacgaccacgtg

SEQ ID NO: 14784 - DNA, 362 bp, Bos taurus
  Clone ID: 63-LIB34-007-Q1-E1-H4
gtgcgcgtgagccccgtagggccggggaggcaccagctgccgcgcggggaggaggccgaggccgcagcgtgagggaggccccggcccctctgcgcctgtgtctggcagagccggtgtgagacgaagagacaatccttcccagccgccaggataatcaagagttttggccggaccttcgagcacacaccgagatagtgaggagccagacgaaaagcacagactatggcgctgaaacggattaataaggaacttagtgatttggcccgtgaccctccagcacaatgttctgcacgtccagttggggatgatatgtttcattggcaagccacaagttatgggacctaatgacagcccatatcaag

SEQ ID NO: 14785 - DNA, 406 bp, Bos taurus
  Clone ID: 63-LIB34-008-Q1-E1-H12
gaagatgcaggccagaaagcaccgcatctgagaggggctgtctctctggtgggtgaaacaacagcaaataagcaagacacccagtaacagtctccacctgggacccaaggcccgccccgcctccaccacccttccaccccaaccaagacgacaggattccagcccatagaaaaaccacggggacaaaggttctagaaaatagaaactgttgggattacaaaggtacccatttcatccatacaaactggtctttcgaacatccttgtgagagtttaactgtagtgtccaaatgtttaggggaaaaaacaatacaaacacaaacaacccattgacgggaggagtttttcctccccttttggtttatcacagcatttttttttctcctttcattttggcacaacctttc

SEQ ID NO: 14786 - DNA, 424 bp, Bos taurus
  unsure (373): unsure at all n locations; Clone ID: 63-LIB34-008-Q1-E1-H4
cggacgcgtgggcagaaataacagcagtgcatttatgggagttaactagaataggaatggtgtcaggcatatccagtatgattggtacgtgggaattatcattgattctgatcactcttggtcagctagcttccttttctttttcctttcattcctttcattcctttctctttccctccctcttaccctccctccctccctctttctttgtttctttttctctcttttttttaagacacaaaaattaagtttaacagttttgcattacaagcttgtaattcatgcttactgtaaagtggaagtcaggattgttttaaaacttcaagctcagtaattttgaacactgaaacattcacttacgatgtactaacanagttcagtattgaccataactgttaatacaactttcagctttcttcaagtt

SEQ ID NO: 14787 - DNA, 410 bp, Bos taurus
  Clone ID: 63-LIB34-009-Q1-E1-H12
cgtttttgtatgaatattcaagaaggcatcctgaatatgctgtctcagtgctattgagacttgccaaggaatatgaagccacactggaggaatgctgtgccaaagatgatccacatgcatgctattccacagtgtttgacaaacttaagcatcttgtggatgagcctcagaatttaatcaaacaaaactgtgaccaattcgaaaaacttggagagtatggattccaaaatgcgctcatagttcgttacaccaggaaagtaccccaagtgtcaactccaactctcgtggaggtttcaagaagcctaggaaaagtgggtactaggtgttgtacaaagccggaatcagaaagaatgccctgtactgaagactatctgagcttgatcctgaaccggttgtgcgtgctgcatgag

SEQ ID NO: 14788 - DNA, 399 bp, Bos taurus
  Clone ID: 63-LIB34-009-Q1-E1-H4
gtccgaacccagaacactttggcacaatgaagtgggtgacttttatttctcttctccttctcttcagctctgcttattccaggggtgtgtttcgtcgagatacacacaagagtgagattgctcatcggtttaaagatttgggagaagaacattttaaaggcctggtactgattgccttttctcagtatctccagcagtgtccatttgatgagcatgtaaaattagtgaacgagctaactgagtttgcaaaaacatgtgttgctgatgagtcccaagccggctgtgaaaagtcacttcacactctccttggggatgaattgtgtaaaattgcatgccttccgtgaaacctatgggggacattgctgactgcggttagaagacaagagcctgaaagaaatg

SEQ ID NO: 14789 - DNA, 420 bp, Bos taurus
  Clone ID: 63-LIB34-010-Q1-E2-H12
gcggcggctctggatccactgcccacaccccgctctcgcaggcagacatgaggacagagagaatgtcccccctcctggctctggggatcctggtggctgggctctgctccagggtccactgcctcccagagaatgtgaccccagaagaacagcacaaagtgacatctgtggatggccactcattagcctccagcaacactgacttcgccttcagcctctacaagcagttggctttgaaggaccccaataagaacgtcatcttctcccctctgagcatctccatagccttggccttcttgtccctgggggctcatggccccactgtgacagagatcctggaaggtctcaagttcaacctcacagagacccccgagacagaaatccaccagggcttccagcacctcctgcagacgttcaatc

SEQ ID NO: 14790 - DNA, 398 bp, Bos taurus
  unsure (362): unsure at all n locations; Clone ID: 63-LIB34-010-Q1-E2-H4
cggacgcgtggggggccacattgctgctgggcagccctacttcatctcagacggcaggcctgtgaacaactttgagttcttccggcctctggttgagggcctgggctacaagttcccgtccacccgcctgcccctgaccctcatctattgcttcgctttcctgacagagatgacccacttcatcttggggcgactctacaacttccagcccttcctcacccgcaccgaagtttacaaaactggcgtcacacattactttagcctggagaaagccaggaaggagctggggtatgaggctcagccgtttgacctccaggaggcagtcgagtgggttaaagccatggtcacggcagacgtcctgngagttgtgactccaagtgtcctgtttgggatgggct

SEQ ID NO: 14791 - DNA, 409 bp, Bos taurus
  Clone ID: 63-LIB34-011-Q1-E1-H12
gcgtccgagcagagccggcgtgacccacccgccatgctccccccagcgctcgtcttgctgttggggtttctctgccacgttgctatcgcaggacgaacctgccccaagccagatgagctaccgttttccacggtggttccactgaaacggacctatgagcccggggagcagatagtcttctcctgccagccgggctacgtgtcccggggagggatccggcggtttacatgcccgctcacaggactctggcccatcaacacgctgaaatgcatgcccagagtatgtccttttgctgggatcttagaaaacggaacggtacgctatacaacgtttgagtatcccaacaccatcagcttttcttgccacacggggttttatctgaaaggagctagttctgcaaaatgcactg

SEQ ID NO: 14792 - DNA, 386 bp, Bos taurus
  unsure (343): unsure at all n locations; Clone ID: 63-LIB34-011-Q1-E1-H4
agagtctgttgactgtaatcttgctgcttatatgtacctgtgcttatatccgatccttggcacccagcctcctggacagaaataaaactgggttgttgggtatattttggaagtgtgccagaattggtgaacggaagagtccgtatgttgcagtgtgctgtatcgtgatggccttcagcatccttttcatacagtagcttggaacaacgccagaattccagtcgctatcagatttaaatatgacaaaaaaggactgatctgccgaaaatagtggaaagaatggttaacccttttatctctcaacattgaatgagctacactttcagctgctgttctccatttntgttattggaccaatgttctatataaataattaggaatgtaca

SEQ ID NO: 14793 - DNA, 423 bp, Bos taurus
  unsure (376): unsure at all n locations; Clone ID: 63-LIB34-013-Q1-E1-H12
tcccgggacgcgtcagattagcagttgccagtaaattccgtgaagtgaaaaggggtatcatcagacgtgacagtctgtgggacaagctcatctttgggaagatccaggaaagcctgtgtgggaaggttcggttactgatcaccggagctgcccccatctcacctcccgtcttgacgttcctccgggcagcactgggatgtctggtgtttgaagcttatggtcaaacagaatgcactgctggctgtacagttacattacctggggattggtaatcaggccacgttggagtccccatggcttgcaatcatgtgaagctggaagatgtacctgatatgaactactttgccgtgaacaatgaaggagagatctgcatcangggccacaacgtgttcaaaggatacctgaaggagcccgagaagacac

SEQ ID NO: 14794 - DNA, 411 bp, Bos taurus
  Clone ID: 63-LIB34-014-Q1-E1-H4
aatgtggcttatatgagtatgcttaattcatactcattcaaagtgagctggggctgttttctccccctcccttcttgcttccccgtccatataacccaggctgcctccagactgcctttgcccacttgactcactggccgtaagcacggaaaggtgcagagtcaccaagaatgggcactttcttctctgagcctgggtggctcttcctgactgtcaccgcagtgctgggaggaacaattctttgcaaactcaagactagcccagggcatgtggggagaaaggtggtctgcctggcgggcctctggggaggcgcttgcctgatcagcctgtccctcttctggggcttggtcctcttctccctgtcgtatttcgtcatgtatacttacttttctggccaagagttgttacctg

SEQ ID NO: 14795 - DNA, 395 bp, Bos taurus
  Clone ID: 63-LIB34-015-Q1-E1-H12
cggacgcgtggggaaacttttcctgtatctttaacaaaaagtgattatgagaattttatggaacgtattcttgaggaactgacgtatgtggcgaaagattccttttggtcctatctttcaacagtgaaaaatgtattttgggaattttttgatattgctttacgtatgtgtgaagatgctgtttccaacaagaaattaatgacaaaactgcaggaatcaaggtttgatatccttattgcagatgctgttggaccctgtggtgaattgctggctgaattacttaaaataccatttgtgtacagtcattacacctcacctggccacataattgagaagaagagcggaagacttccattcccaccatcttatgtacctgttatgttttcagaattaag

SEQ ID NO: 14796 - DNA, 414 bp, Bos taurus
  Clone ID: 63-LIB34-016-Q1-E1-H4
accccacaaaactttggcacaatgaagtgggtgacttttatttctcttctccttctcttcagctctgcttattccaggggtgtgtttcgtcgagatacacacaagagtgagattgctcatcggtttaaagatttgggagaagaacattttaaaggcctggtactgattgccttttctcagtatctccagcagtgtccatttgatgagcatgtaaaattagtgaacgaactaactgagtttgcaaaaacatgtgttgctgatgagtcccatgccggctgtgaaaagtcacttcacactctctttggagatgaattgtgtaaagttgcatcccttcgtgaaacctatggtgacatggctgactgctgtgagaaacaagagcctgaaagaaatgaatgcttcctgagccacaaggat

SEQ ID NO: 14797 - DNA, 415 bp, Bos taurus
  Clone ID: 63-LIB34-017-Q1-E1-H4
gaaaagtcagattatggaaacctaactttccctgaagacacagctgtgggatctgtcatcttaaccatccaggccacagacgctgatgaaccacatactgggagttctaaaatcctgtatcgaatcacacagggagacagtgagggacgtttggagattgaaacagatccccaaaccaatactggatacgtcaagcttaaaaagcctcttgattttgaaacagtagccattcataatattgtagtccaagcagaaaatcctgagcctctggtgcctggtgtacagtataatgccagctcttctactaccttcagactgacggtgacagatgtgaatgaggccccgcaatttttccaacaagtatctgaagcaaaagtcagtgaggctgtggctaaaggcacaaaagtgggcaaca

SEQ ID NO: 14798 - DNA, 409 bp, Bos taurus
  Clone ID: 63-LIB34-018-Q1-E1-H12
gaacatgatgaaattcctgctgattgtaccatcatttataaccaaggcaaacatacaagtggcatctactccattagacctagcaactctcaagtttttaatgtctactgtgatgttaaatcaggtagttcatggacattaattcaacatcgaatagatggatcacaaaacttcaatgaaacgtgggaaaactacaagtatggttttgggagacttgatggagaattttggttgggtttagaaaagatatactccatagtaatgcaatctaactatatcttacgaatcgagctagaagactggaaagacaagtattatactgaatactcttttcacttgggagatcacgaaaccaactatacactacatctagctgaaatttctgggaatgggcccaaaggatttccgg

SEQ ID NO: 14799 - DNA, 435 bp, Bos taurus
  Clone ID: 63-LIB34-018-Q1-E1-H4
ttccaggccgacccacgcgtcaggcggaggagtggggcttttaggttctgtagctggtcgcaatggcaagcaaaggagggtacatcgtgcttgggctcctgttcctggctgtcctctgccaactcggtcacagcctgcagtgctacagctgtattaaccaagttaactgcacttcaatcgtcaattgttcacataatcaagatgcttgtctcttcgttaaggctgtgccgctaaaattttaccaccagtgttggaagtacgaagaatgcagttttgagttcattgcaaaagccttaggggagaaggagctccactatgactgctgccagaagaacctgtgtaacaaaagtggcgggaggagcgtatccgagaagatactgctgctgctcaccctgctgctggaggcagtctgccacttttatcgctaaatctatg

SEQ ID NO: 14800 - DNA, 326 bp, Bos taurus
  Clone ID: 63-LIB34-019-Q1-E1-H3
gactcgagcaaggagctggtggctcttccatccccagaccagccaagcctgtgagtgacaccccagacagaggaaccagacccatgcggagtctcaggggaaggcttttgtgacagactgcctgcctggcagtaaacgccagctccgtgcccacattgcccgatgacattcaagtgcaggagaacttcgacctgtctaggatctatgggaagtggttcaatgtgggtgtgggctccacctgcccatggctgaagaggttcagggagaagatcaccatcaacacagtgttgtataaagcggggccgaccagcagggatatcagcgtc

SEQ ID NO: 14801 - DNA, 250 bp, Bos taurus
  Clone ID: 63-LIB34-020-Q1-E1-H12
ggtcgacggacgcgtccaatctcgatcatgagtccagaagacagctgggtccccaagttgcaaccaatccattactttaagccaagcctgtaagcaatgtccgtctaagggcccctggcccaagggatcctgcgggaactcaaaagtctaagcgtgggccataaatctacagacacagggataaagacctaagaaagcgcatagctgtgagaatcttgcccccccatatctggggccgtttgttttctct

SEQ ID NO: 14802 - DNA, 410 bp, Bos taurus
  Clone ID: 63-LIB34-020-Q1-E2-H12
atcgcgatgatgagtccagaggacagctgggtctccaagtggcagcgagtcagtaactttaagccaggcgtgtatgcagtgtccgtcactggtcgcctgccccaaggaatcgtacgggagctgaagagtcgaggcgtggcctacaagtccagagacacggccataaagacctaggaaggcgcatggctgccagcatcttgcctcctcatctctgccgccgtttgttttctgtcatggagctaaatgggcagaacttgaaacacatcgcgccctccgatattaagactcggctgactcaacagatcagcccaatgtgtccttgggccatttttaccctctttggactactgtggggggtgggtagagactgagttccgtggggagtaggatgctagttttcctacctacag

SEQ ID NO: 14803 - DNA, 428 bp, Bos taurus
  Clone ID: 63-LIB34-021-Q1-E1-H12
cgggtcggtcacgcgtccgatccaaagtaagagtgctctgaaatacaaaatgaaaggaataatcagttggctaaaacccctctttggatcttctgtctgatgattctaatgggtcaaatcttcaggaatgtgcttcttatgccagggatctgtctgtatcagataaatgatttcagttgcagtgaataaacttgtgttaacattgtaatagctaaggagagaggctcaggaataagttgaggtccccagttccttgatcatgtgagaaatatgtcatcaattattaattgataaatgcataaattcatgttgagtctttcatcctcacacatgtggcagtgataggaaatcttatggacccttcattcaacagatcctcattgttcatccctaagcatcttgcacaacacttaacaggcctaaaacct

SEQ ID NO: 14804 - DNA, 436 bp, Bos taurus
  Clone ID: 63-LIB34-022-Q1-E1-H4
tttatatccaaaacacagtaggatccctaaatttcctaatattacagtactgagtacaacctgttcataactcttgatctaatgtcttcatatgactagcatgtataatagctttcatagtaaaaataccactatatggcctccacctttgactacctaaagctcacgtagaagcccccatcgcaggctccatagtccttgcagcagttctactaaaactaggggggtacggtatgctacgaatcacactaattctaaaccctatgaccgactttatagcatacccattcattatactctccctatgaggcataattataaccagctcaatctgcctccgtcaaacggacctaaaatcactcatcgcatactcctctgtaagccacatagcactcgttatcgtagccatccttatccagacaccttgaagctacat

SEQ ID NO: 14805 - DNA, 358 bp, Bos taurus
  Clone ID: 63-LIB34-023-Q1-E1-H12
gcacgcgtccgaaataaatagtatcacaattctaaaggacaaacatgaacattaatattaatatctctgatcctatttattggatcaacaaacctactaggcctattaccccattcattcacaccaacaacacatctatcactaaacctaggcatagccatccccctgtgagcacgatccgtaattacaggattccgcaataaaactaaagcatcacttgcccatttcttaccacaatgaacacccactccactaatcccaatactagtatttattgaaactatcagcctttttattcaacctatacccctcgccgtgcggttaacagctaaaatcactgcaggatacctattaattc

SEQ ID NO: 14806 - DNA, 347 bp, Bos taurus
  Clone ID: 63-LIB34-023-Q1-E1-H4
cacaaagggagcttccaaagcgataccactatggcatgtacgccaagttcatcaatgactacggcacccattacataacgtctggatcgatgggtggtgtctatgagtatatcctggtgcttaacagagaaaaaatggaaacagctggtgttaccagcgctgaaatccagaaatgctttggagtctctttgggcattgagtatgagtattcagaggcgatacaaattaaaggaagttcatcattaggaccctgtaaaaaatctggagatggcaaactaactgaaaacgagaaggccatgggagtggaagacttcatttctcgggtgcgcggcggcagctctggctgg

SEQ ID NO: 14807 - DNA, 386 bp, Bos taurus
  Clone ID: 63-LIB34-025-Q1-E1-H12
cttctcccgactcgacgtcgtcgttacagggagcgaagaagcgggtgagaaaaacttctgtttccaccgttttgcccatttctgcagatttgttccgaggccgaggcatctccaaggcagtgatggctctccagaggacccaggcctttcttctgctcttgctgctgaccctgctggggctagggctggtacagccctcctatggccaggatcgcatgtaccaacgattcctgaggcaacatgtggaccctgatgagacaggaggcaatgacagctactgcaatttgatgatgcaaagacggaagatgacttcacatcagtgcaagcgcttcaacactttcattcatgaagatctttggaacatccgtaatatctgcagcaccacc

SEQ ID NO: 14808 - DNA, 400 bp, Bos taurus
  unsure (346): unsure at all n locations; Clone ID: 63-LIB34-025-Q1-E1-H4
cctcgggcgacccaagccttcggcttcaaaaaatttaaaacaatgaaccatcaattacggcaacttttctgtgcttttatagttcaggcccaatttcctactgactatgacgagggacaagatgacagacctaaggtaggtttgggtgcccgcggtcatcggccctatgacaagaagaaggaagaggcccccagcctgagacctgtgccccctcccatcagcggaggtggctatcgggctcgtcccgccacagcaactgtgggccagaagaaagtggagagaaagccccctgacgctgatggctgcctgcacgcggacccggatctgggtgtgttgtgtcctacangatgtaagttgcaagatactttggtaagacaggagagaccaatccgaaagagta

SEQ ID NO: 14809 - DNA, 398 bp, Bos taurus
  Clone ID: 63-LIB34-026-Q1-E1-H12
aactttggaacaatgaagtgggtgacttttatttctcttctccttctcttcagctctgcttattccaggggtgtgtttcgtcgagatacacacaagagtgagattgctcatcggtttaaagatttgggagaagaacattttaaaggcctggtactgattgccttttctcagtatctccagcagtgtccatttgatgagcatgtaaaattagtgaacgaactaactgagtttgcaaaaacatgtgttgctgatgagtcccatgccggctgtgaaaagtcacttcacactctctttggaggataattgtgtaaagttgcatcccttcgtgaaacctatggtgacatggctgactgctgtgagaaacaagagcctgaaagaaatgaatgcttcctgagcca

SEQ ID NO: 14810 - DNA, 410 bp, Bos taurus
  Clone ID: 63-LIB34-026-Q1-E1-H4
cgggtcgaggcacgcgtccgattgcatcagaccacactatctccactcgctcagacctgtggaagattagcgaccatgatttccaatgggataggaaccgtcaccgctggaaaaaggagtatatgtcttctccctttgctgcttattggcctctggggctgtgtgacctgtcatcggagccctgtggaagacgtctgcacagccaaacctcgggacattcctgtgaatcccatgtgtatttaccgttcctcagagaagaaggcaactgagggccaaggctccgagcagaagatccctggggccaccaaccggcgggtctgggaactgtccaaggccaattcccactttgccactgccttctatcagcatttggcagactccaagaataacaatgacaacattttcctgtc

SEQ ID NO: 14811 - DNA, 124 bp, Bos taurus
  Clone ID: 63-LIB34-027-Q1-E1-H12
cggaagcgtgggttgaacccaatgaatatttcacaaatgaagtgttgagaaagacatataggatgaggtcagaaccagatgattcggatcccttttcttttaatggaccaggggttatggtttg

SEQ ID NO: 14812 - DNA, 393 bp, Bos taurus
  Clone ID: 63-LIB34-027-Q1-E1-H4
cgtgacgctccaggaacagcagaacctcagtgcaggtgacttagaatccaccaggcctgccgccgcagcagcaccctccgtcccgccagcgcccccactgccaccccctccgcctcccctcccctccccggggctccagcagagcacttctgctattgatctgataaaagagcgaagacggagaaacgcctctgctgggaagaccccggtcaagaacagtccagagaaaacagacctgcccaacatgctggagatcctgaaagacatgaacagcgtgaaactgcgatcggtaaaaaggtcagaacaagacacatagcccaagccggcagatgctgctgaccctgctgccctcatagcagaggcgctgaaaaagaagtttgcttatcggtatcg

SEQ ID NO: 14813 - DNA, 389 bp, Bos taurus
  Clone ID: 63-LIB34-028-Q1-E1-H4
gccgcaggtcacccgtcacgatgtccggcaaaggctccgtggttctggcctacagtgggggcctggacacctcctgcatcctcgtgtggctgaaggagcaaggctatgacgtcagtgcctacctggccaacatcggccagaaagaagactttgaggaagccaggaagaaggcgctgaagcttggggccaaaaaggtgttcattgaggacatcagcaaggagtttgtggaggagttcatctggccgggcatccagtccagcgcactgtacgaggaccgatacctcctgggcacctctctcgccaggccctgcatcgcccgcaagcaggtggagatcgcccagcgagaaggaaccaagtatgtgtctcacggcgccacaagaaaagggaac

SEQ ID NO: 14814 - DNA, 412 bp, Bos taurus
  Clone ID: 63-LIB34-030-Q1-E1-H4
gcccagccccctgggaatccaggatggtgacctcgacgggcaccctgccctccctcctgctgggaaccctgctcacgttcacctccggggccctgggggccaatcccggcctggtcgtcaggatcaccgaccagggcttggagtacgtggcccaagaggagctgttggctctgcagagtaagctgcacaaagtcacactgcccgacttcaacggggacgtcaggatcaaacattttggcagtgtggactatagattccacagcctgaacattcagagctgtaagctgcttggctccgctctgaagctcctccccaatcagggcctgcatttctctatctccgactccttcatccaggtcacgggcgactggaaggtgcgcaagaggatactgagactagacggctcctttga

SEQ ID NO: 14815 - DNA, 331 bp, Bos taurus
  Clone ID: 63-LIB34-031-Q1-E1-H4
aaagaaaggaattttaaatgtagagagaaaagatgaatgtcaggcatttgaagaactataggaaaatggtaaacactttattatacttgagaaattcttcttgacatgtaaatgaagtagatctgatctttgaaaaagtgactagaaatccaatccattgccttgctgacctcggacaggaatagagagtggggtcctagggaaacctgcctagtggagctccggaacccatctctcccagtccggtgaaaccacagccttccaacctgccctgagaccccttacacgatggggttgacaaagtagtgttccaagtcactgggtaaactgg

SEQ ID NO: 14816 - DNA, 211 bp, Bos taurus
  Clone ID: 63-LIB34-032-Q1-E1-H4
cccacttaacagacttgccatcggagaaggacagcagcaccaactgggaggatcctcatgggcgaggagacgtgatactcagaccatttcagaagtgatttacttttttaaagaactttatctgaagagaccaagatagtatttttcctatgggacaacggacttgctcagccccacatcaaatttaaactcataaggtgccatgttgaaa

SEQ ID NO: 14817 - DNA, 344 bp, Bos taurus
  Clone ID: 63-LIB34-033-Q1-E1-H4
cagacgcatgggtgccgagcctactatgtatggagagattctatcccccaactaccctcaggcataccccaacgaggtcgagaaatcttgggacatacaagtccctgcagggtacgggatccacctttacttcaaccaactggatatagagttgtccgagaactgctcctatgattcagtgcaaataatgtctggaagccatgaagaaaggagagtctgtgcgcgcgcgagcaagaggaattcaaactccccagtgggtaaagagttccacatcccatagaggtaaattgcaggggatcttccggtcggagctctccaacgaggagcgtgtcaccggggtttgg

SEQ ID NO: 14818 - DNA, 399 bp, Bos taurus
  Clone ID: 63-LIB34-035-Q1-E1-H12
atgataacaatttcttgctctcaccaattttttatattaagcaagatggcctgttccagcagggtcatattttttaagttatctttcagggcaaaatggaaataatataaagttggatgtcaaattttaatatgttttcagtgttctctaatttttaggaatttttgtagcctttacacttgggaaaaaagatttgtaaattcaccaaaatacttgtgtgctttattttatagtgattggtaatgttacatccccattttttttaaggaaaaaacatactcttggttacgatgtgtggagatatattgccatgtatattgaatcaaaatatcttaacataaaagtacttgtgaagtaatatctttcttgtgcattttcaacacttgtaaactggaaatc

SEQ ID NO: 14819 - DNA, 433 bp, Bos taurus
  Clone ID: 63-LIB34-035-Q1-E1-H4
atccacgcgtcagccatattctcaatagagaccattaacatattttaatattgtactctgtgtaggtctcataaagcaaaataaggtctaataagcccccaaacaagactgataaaaatctaagaagctaataaggcttatttcagctaaaacctggaaaatctgaggcttaaagttgactgttacacttcatcacaaatgtacatggtgtttgagtgctattatttgaaatgatttttatcttcatgtctttaaaaatcttagaaaagttgatgattgacttgattaaagatacaaagtttttggctcatgttttcacagtaataatgaatgatttattttataatgttaaagtaatacataaaagaattgatgtgctttggatgacttgataaaggtaaataataaagtgaaatctattttctcatttgtc

SEQ ID NO: 14820 - DNA, 181 bp, Bos taurus
  unsure (17): unsure at all n locations; Clone ID: 63-LIB34-036-Q1-E1-H4
cacgcgtccggtcatcncgcctattgtttttttctgatagtttttcaccagagggaaaaacatagtcttgatcacagccctcgacaccagttcaatttcacaatttatagtatagctaagaaagaaaatatcccaaagagatgaagaaaatttgcctcaagtcacactacagtccaacaag

SEQ ID NO: 14821 - DNA, 445 bp, Bos taurus
  Clone ID: 63-LIB34-037-Q1-E1-H5
tcccgggtcaaccacgcgtccggagctgacagctactctttcgtgtttgcccgagaccccagcggcttttccccggaagtgcagaaaatcgtgcggcagaggcaggaggagctgtgcctggccaggcagtaccggctgatccctcacaacggttactgtgatggcaagtcagaaagaaacattttgtagcaacatggaaggtgtcctttcattaggaaacttcccattaaccttactcagcctccaactcttaggagtttagtttgcttcacctcccctccctgcccctcccgcccctcacctcccctctgtaaacaaaaaaaaaaacccttcagtatacgtaaaaaacatacatggggatcagtgaatctgcttgtactcaaatgtatgtcttctctggagttttctaaggaatcatttgaggcttaggattccagactttgac

SEQ ID NO: 14822 - DNA, 261 bp, Bos taurus
  Clone ID: 63-LIB34-039-Q1-E1-H12
gccatcggggcgccgcggcccatgtgctgcggcccggggctggggtccgactgccgattcagcccaccaggggtgctcggcactggcagccagatgtggaatgggcagaccagtaccggggtgctgtcatgtaccccatcaacgaaacagcccactggaaacctcctccttggcatgatgtgcaccctctacacgacacactggtgtccaacctgaccctgaaccttgggccccagcacccagcaacccatgggagtcctg

SEQ ID NO: 14823 - DNA, 389 bp, Bos taurus
  Clone ID: 63-LIB34-040-Q1-E1-H12
cagacgcgtggggcagaggcaaagcagagggagtttcgtggaaggagtcggagagactgtggggccagcaacatggaaggggcaggcgggaagcccacggctgttgttgcagttgtgactgagcctcgatttactcagcgatacagggaatatctcgagaagcacaaactcctggatagacagcaccgtgtgaaaaagctgcgggatggcaccgtggcgctaccggttctgagagaggccctccttgagcagcatctacgagagctgaggaatcgtgtggctccaggcagcacctgtgtgccgacgcagctcctggatcctgttccttcaaagaaggcccagagttactcacctgcccaaaggctgtgtcttgaggtgagtcgctgggt

SEQ ID NO: 14824 - DNA, 218 bp, Bos taurus
  Clone ID: 63-LIB34-040-Q1-E1-H4
ccgggaccacccacgcgtccggtaactgggggcacatgaccacactgtgacagacatcctggaacgtctcaagttcaaactcacaaacacaccccagacagaaatccaacaagggttccagcacctcctgcacacgttcaatcagcccagcaaccagcttgaacttaaccttgggaaccgcatgtttgggtcaaaagaacctaaactggtggacaaat

SEQ ID NO: 14825 - DNA, 268 bp, Bos taurus
  Clone ID: 63-LIB34-041-Q1-E1-H12
aatttttccatttaatccatttgatcttaccaaggtttggcctcacggcgactatcctcttattccagttggtaaattggtcttaaaccggaacccagttaattacgttgctgaggttgaacacttggcctatgtcccaagcggcagtccgcacggcctcaagcgcattcctgacaatgtgctccacagacacctttatgccaaccatgacactcaagcagacatgctgggacactaggagctccacatatctgagacctgtcacgac

SEQ ID NO: 14826 - DNA, 424 bp, Bos taurus
  Clone ID: 63-LIB34-041-Q1-E1-H4
cgcgtccggaagcttaatgatggccacttcattcctgtcctgggatttggcactgctgaagctaaagaggttcctaagagtgaagctctggaagtcaccaaatttgctatagaggttgggttccgccatattgactgtgctcatgtgtaccaaaatgaagagcacgttggccaggccattcgaagcaagattgcagatggcactgtgaagagagaagacatattctacacttcaaagctttggtgcactttccttcgaccagagttggtcagaccagccttggaaaagtcactgaaaaatcttcacctggactatgttgatctctatattattcattttccactggctatgaagccaggggaggaattattgccaaaagatgaaaatgggaaactgataagtgattcggtggatccctgtcaca

SEQ ID NO: 14827 - DNA, 304 bp, Bos taurus
  Clone ID: 63-LIB34-042-Q1-E1-H4
gtccacttaaacatttttcagttctcaccattatgacaaacagaatctgctcacactacgctgcttatggcaaggagaagtcaaggctcaggcatctcatcaaatttgcccagaaagtgcctactgcacatccggaagatgttctgccacttgctgaagatattacaacaatcctctccaagtgctgtgactctgtcgctgaggactgcatcaaagagcctcctgaatatgcagtataactctgtgacagcttatccagtaaaaattcgacatttaaggactgttttcaacaaaaaacacccat

SEQ ID NO: 14828 - DNA, 418 bp, Bos taurus
  Clone ID: 63-LIB34-043-Q1-E1-H4
taaactcacacatactggagattatatataatagatatatataaaaattattttaatgcattgtagtgtaatatttatgcctactatactgtataacacgttattcaaaagggatatgccatttctgagacacgataacaaaaaaaaagtttgaggaaattattttgcttctatttatagctctgtcaaaagtcagaagactctaaatgctttgcaaaaatggtttcacatttgcttaaatgcttcatcacagtcacatttaaaatagtgactctaaacaaagaagaaagcagcactgtcatcagatgcatgataaaccaaaatatgaaaatgggaaatgtttaattaacctagtcattgggtgggttaagtacatgggtgaattttatatgtgatttgttttgttttgttttgttca

SEQ ID NO: 14829 - DNA, 414 bp, Bos taurus
  Clone ID: 63-LIB34-044-Q1-E1-H4
aaaacagtaggtaacttttcctaggtttcactctttttagtgtactagatccagaaatttagtgtaatgccctgctttatatttctttgacttaacattggtttcagaaagaatctttgctacctagaatctacagtccctattttatggcaacactggataatggctttgtgaaattgggaaaaaaaaaaatgggagtgactgtaaacagaaatgccaaattattgatggttactgttgctgcttcaaataagtataaaattaatgtgtaagaaagcccattctttcatgataatacttggggttgaaggggggagatgggggaacattttcttaagatgaaaataattaactgctattttaaatttcttgatcattgaatgtgagacccttctaacatgatttgcgaagctg

SEQ ID NO: 14830 - DNA, 340 bp, Bos taurus
  Clone ID: 63-LIB34-045-Q1-E1-H12
acgcgtccgaaaagaatggtaccagggtgtgttcaactaatgggaaaagctactcaacttaccgtcagcagatcagttttgaatgttatcgtcctgacgcaaagtttttgaaaagtggaacatgcacaggtggagggcaattcagtgtttccctgacataaggaaaacaagattcagaatgaattgttgctgtaaaacttgcagacctagatacaaaaatgtttgtgtgtggaaacagctggagcattactgaggccaacgttgcctgcattgaccgtggatttcaactgggtgctcttgatactcatacaagagatcctgatcaaattctgctgaatgt

SEQ ID NO: 14831 - DNA, 426 bp, Bos taurus
  Clone ID: 63-LIB34-045-Q1-E1-H4
gtcttgattgtcgaagatataattgacactgggaagacaatgcagactttgcttgccttggtcaagaagcataaaccaaagatggtcaaggttgcgagcttgctgatgaaaaggacccctcgaagtgttggatataaaccagactttgttggatttgaaattccagacaagtttgttgtgggatatgcccttgactataatgaatacttcagggacttgaatcacgtgtgtgtcattagcgaaactggaaaagcaaaatacaaagcctaagatgagagtccgagttgagtttggaaatacctgccgtcccagtgaaatcaccagtgacatgatccaatgttcttgttctgtggccagctgcttaatagagcttattgcatgtatctcctaagaatttgatctgtcttgtattttaaaaatgtcagt

SEQ ID NO: 14832 - DNA, 426 bp, Bos taurus
  Clone ID: 63-LIB34-046-Q1-E1-H4
gccaattacctgtcccaggccctccaggctggcactgtgtgggtcaactgctatgacgtgtttggggcccagtcgccgttcggtggctacaagctgtctgggagtggccgggagctgggggaatacgggctgcaggcgtacaccgaagtgaagaccgtcacagtcagagttcctcagaagaactcctaaagaaccacgctggctttcttactcatccagtaatggaaggctcagagatcagccacaagaccaagaaaaatgacccttgcacgctaaaggtctcaaaagagaaactctgccagaagaatctcttggatcaagaaagttccttccaatacacgggctaggtgtggggcaaagggtacatggaaagccttttacactgcaatactgctactagctttcaaagtgactttccacagattc

SEQ ID NO: 14833 - DNA, 317 bp, Bos taurus
  Clone ID: 63-LIB34-047-Q1-E1-H12
gtcaggtgctcctgggctccggtctcaccatcctgtcccagccgctcatgttcgtgaaagtgctcatccacgtgggatatgatcctcttgctccaacagtaggacgagatatttttgggcggcaagtctgtcaacttcctgggctcttttgttatgcgatgatgtcaatctccggtttgtgttcttagctcagcatatcgctagcatttccgggaagcgtggattgttcacacgcttaactccaacactgtgtacaggcgtccttgtaactggtgggccatggtaacgttctagagcactaccaagagtgtgcccag

SEQ ID NO: 14834 - DNA, 399 bp, Bos taurus
  Clone ID: 63-LIB34-047-Q1-E1-H4
cccacgcgtccgggcagctgggaccctgtacacatatcctgaaaactggagggccttcaaggccctcattgccgctcagtacagcggggctcaggtccgcgtgctctccgcaccaccccacttccattttggccaaaccaaccgcacccccgaatttctccgtaaatttcctgctggcaaggttccagcctttgagggtgacgatggattctgtgtgttcgagagcaatgccattgcctactatgtgagcaacgaggagttgcggggaagtactcccgaggcagcagcacaggtggtgcagtgggtgagctttgctgatagcgacatagtgccaccggccagcaactgggtgttccctaccttaggcatcatgcaccacaacaagcaggccacagagaa

SEQ ID NO: 14835 - DNA, 450 bp, Bos taurus
  unsure (27),(33): unsure at all n locations; Clone ID: 63-LIB34-048-Q1-E1-H4
cgacgcacgcgtccggtcctctctgcncatganaacgtggtggtggtgaccattcagtaccgcctgggcatctggggattcttcagcacaggggacgagcacagtcgggggaactggggccacttggaccaggtggccgcgctgcactgggtccaggagaacattgccaactttggaggggatccaggctctgtgaccatctttggagagtcagcaggagcagaaagtgtctccattcttgtgttatcccccctggccaggaatctcttccaccgggccatctctgagagcggcgtggccctcatttccaccctggtcaagagggactcgaaggctgcagctgagcaaattgctgtcattgctggctgtaaaaccaccacctcagctgtcctttgtcactgcctgcgccaaaagacagaggacgagctcctggaggatacactgaaaatg

SEQ ID NO: 14836 - DNA, 426 bp, Bos taurus
  Clone ID: 63-LIB34-049-Q1-E1-H4
gggtcgaggcacgcgtccgatttgaatcaagagcttcttccagccgtggcttggcgaaacagcttctgacatgaataaagtttacagaagtcgtgttcctgcgataagaaataaagacgtgaccttccagttgtgtaaagctcttaaatgctgtttaagtgcgtcaggtgcgctaaggaacctggagctaaacgggctagttctgagagagagagacttaacgatgttgacaaagggattgaataaatcggccactctggtgcacctgtctcttgcgaattgtccgattggagatggaggtttagaaattgtttgtcaaggtataaagaactctgtcactcttaagacaatcaacttcacggggtgtaatctgacatggcatggagcagatcacatgggcaagatcttaaagtatcagaccatcat

SEQ ID NO: 14837 - DNA, 407 bp, Bos taurus
  Clone ID: 63-LIB34-050-Q1-E1-H4
aatgatcttaacgatattcttgaccctttttatcatctttcaactaaaagtttcaaaacacaacttttatcacaatccagaactgacaccaacaaaaatattaaaacaaaacaccccttgagaaacaaaatgaacgaaaatttatttacctcttttattacccctgtaattttaggtctccctctcgtaacccttatcgtactattcccaagcctactattcccaacatcaaaccgactagtaagcaatcgctttgtaaccctccaacaatgaatacttcaacttgtatcaaaacaaataatgagtatccacaattctaaaggacaaacatgaacattaatattaatatctctgatcctatttattggatcaacaaacctactaggcctattaccccattcattcac

SEQ ID NO: 14838 - DNA, 281 bp, Bos taurus
  Clone ID: 63-LIB34-051-Q1-E1-H12
gcaggtactagtccggaagtcggggacgagtccaataacatcctttcatgtaaggtggtttgtgatgaaaatggttccaagggttatgggtttgtgcattttgagacacaagaagcagctgaaagagctattgaaaaaatgaatgggatgcttctaaatgatcgcaaagtatttgttggaagatttaagtctcgtaaagaacgagaagcagaacttggagctagggcaaaagagttcaccaatgtttacatcaagaattttggagaagacatggatgatga

SEQ ID NO: 14839 - DNA, 235 bp, Bos taurus
  Clone ID: 63-LIB34-051-Q1-E1-H4
acgatccacagacgctgactatggcgatgaccctgggttactgggacatccgcgggctagcccacgccatccgcctgctcctggagtacacagactcaaactatgaggaaaagaagtacacgatgggggacgctcccgactatgacagaagccagtggctgaatgaaaaattcaagctgggcctggactttcccaatttgccctacttaattgatggagctcacaggctcaccca

SEQ ID NO: 14840 - DNA, 242 bp, Bos taurus
  Clone ID: 63-LIB34-052-Q1-E1-H4
gtagctgcctcgagcagggagctggtggctcttccatccccagaccagccaagcctgtgagtgacaccccagacagaggaaccagagccatgcggagtctcagcggactgctgttgttactgactgcctgcctggcagtaaacgccagctccgtgcccacattgcccgatgacattcaagtgcaggagaacttcgacctgtctaggatctatgggaagtggttcaatgtggccgtgggctcc

SEQ ID NO: 14841 - DNA, 352 bp, Bos taurus
  Clone ID: 63-LIB34-055-Q1-E1-H12
acagcagtgtccatttgatgagcatgtaaaattagtgaacgaactaactgagtttgcaaaaacatgtgttgctgatgagtcccatgccggctgtgaaaagtcacttcacactctctttggagatgaattgtgtaaagttgcatcccttcgtgaaacctatggtgacatggctgactgctgtgagaaacaagagcctgaaagaaatgaatgcttcctgagccacaaagatgatagcccagacctccctaaattgaaaccagaccccaatactttgtgtgatgagtttaaggcagatgaaaagaagttttggggaaaatacctatacgaaattgctagaagacatccctacttt

SEQ ID NO: 14842 - DNA, 358 bp, Bos taurus
  Clone ID: 63-LIB34-055-Q1-E1-H4
agcagccctgacctaggacagtgaatcgataatggcactctccatcacgcggggccttctgctgctggcagccctgtgctgcctggcccccatctccctggctggagttctccaaggacacgctgtccaagagacagatgatacatcccaccaggaagcagcatgccacaagattgcccccaacctggccaactttgccttcagcatataccaccatttggctcatcagtccaacaccagcaacatcttcttctcccccgtgagcatcgcttcagcctttgcgatgctctccctgggagccaagggcaacactcacactgagatcctgaagggcctgggtttcaacctcactgagctc

SEQ ID NO: 14843 - DNA, 295 bp, Bos taurus
  Clone ID: 63-LIB34-056-Q1-E1-H4
gtccagggacacgtcaacactgggaaaatctaacatgttgatgttaatcaatgtccttctcaccttgtggttttacactgctcatggacaggggaaacattgtaattatccagtaataagacatggacggctatatcagtcatacagtggatactttccagcacgtgtaaatcaacagtttctctataactgtgatcagtattttgtgcctccttcactatattcctcggattacctgacttgcacagcagaaggatggtttccagaagaaccatgccttagagaaatgtatttc

SEQ ID NO: 14844 - DNA, 222 bp, Bos taurus
  Clone ID: 63-LIB34-057-Q1-E1-H12
cgcttttgtgctcgccagtctttaacggaacggtctcccagaagcaatttataatgactggtaaaacgaaatatacccaaagctcgcagcaacaaaaaaggatacagttctttctggccagcttcctgcttctgccctttctgctcgtctgcatcgtatagtctctcctgaagctttttattcctaagaacagaaaatcagtcaccggagagattgtcctta

SEQ ID NO: 14845 - DNA, 244 bp, Bos taurus
  Clone ID: 63-LIB34-057-Q1-E1-H4
ccggctcgacccaagcgtacggttctgaaaccctagaggacgcaactgtgagtgtctctgtcctagcctctcaacttgctttcctgtgtccaatagcactgcagactccagtactagcctgtccagagcagcaagtgagaggaaacaagccagcattgtaagaggacatgcttctcctccctctctccgtgctgctcctgctcacacagccctggagatccctgggagcagaaatgacaacctt

SEQ ID NO: 14846 - DNA, 226 bp, Bos taurus
  Clone ID: 63-LIB34-058-Q1-E1-H4
ctgcagaagtggaggggacatcagggccactcacacaacgtctacatgcccacgaaccagcctccaccacctccctactacccccccgaagataagaagacccagtagaccccgccaccccatcctcctgcctcccctcgctctctcctcccctccccttggggctgaatcggggttgtggggcgcaatgggagggccttgtccttcctccagctctgatataaat

SEQ ID NO: 14847 - DNA, 209 bp, Bos taurus
  Clone ID: 63-LIB34-059-Q1-E1-H4
gtgagagtgccctgctggcctggtcctgggtgccggcgtggtgaggaacccagcgctcgcagaggcagccatggggctgctgtctggggacacgctggggcccctggccgtggccctgctcatcttcttgctcttgctggacctgatgcaccggcgctcacgttgggccccacgctacccaccaggccccacgccgctgccggtgctgg

SEQ ID NO: 14848 - DNA, 315 bp, Bos taurus
  Clone ID: 63-LIB34-060-Q1-E1-H12
ctaagagcgaattcatgaagtggcaagaagcgatgttctctgcaggcatgcaattgcccactctagatgagatcaggaagagtgaattatctattaaggaagctctgaattataagttcaatgaccaggacattgaatagattgtaaaagagaaagaaagattcaggttatactctcaacgatacatgagccaagatcgacttcgcaagtatatgtgtaagcgtcaatataaccttcttcccacaacactttctaggactatctggcatgcctcgaggatactccgactacccagatgcatgcacagtatgaaat

SEQ ID NO: 14849 - DNA, 238 bp, Bos taurus
  Clone ID: 63-LIB34-060-Q1-E1-H4
ttagaataatttctcagactacctacagtacctgcctggaagccatagaaagctactgaaaaatgtgtctgaagtaaaaagttatgctttagaaagagtgaaggatcaccagaagtccctggaacccagctgcccccgaggcttcttggacaccatgctgatagaaatggccaaggaaagacacagtgtggaccctatgtacaccttggaaaacatcgctgtgactgtggccgacctg

SEQ ID NO: 14850 - DNA, 327 bp, Bos taurus
  Clone ID: 63-LIB34-061-Q1-E1-H12
gatgcgtcggaaaatcccagctaagcttcgagtgcgccgttcagttccagggaatttgtgaagcaagatgcacgaattagaatcggatgtctcaactcagatggcatactggcgcacaccgtgtagggatacatgcaatattcctgtggtgtctggcaaagaatgtacagaaatcatcaggactggaggtgactgatctgacatgtaactcagtcaacctgacgattctagcagaccatatagattatactgtggaatcaatacggtatcctggcgatgggcaatgagtcaaaagcgtcagaattttaatgttaactttggcacgaa

SEQ ID NO: 14851 - DNA, 357 bp, Bos taurus
  Clone ID: 63-LIB34-061-Q1-E1-H4
cgggccaacccacgacgtcaaagttacacagaccaaagctaattggaattggttgcattatcatgggaactggaagtattttgactgctttaccacatttcttcatgggatattacaggtattctaaagacaccactcttaatccatcagagaattcaacatcaaatttaccaacttgttcgattaaccaaaatttgttacccaatagaacgtcattggaggtagtgggaaaaggtttggaaaaggattctgggtcttatatgtggatatatgttctcatgggtaatatgcttcgtggaattggggaaacccctattgggcccttggggatttcttacatcgatgattttgctgaag

SEQ ID NO: 14852 - DNA, 216 bp, Bos taurus
  Clone ID: 63-LIB34-062-Q1-E1-H4
agttccgggctcagccacgcgatcgagaaccccaataagaatgtcatgttctccccgctgagtgtctccatggccttggccttcctgtctctgggggcccgtggccccaccctgacagagatcctggaaggcctcaagttcaacctcacggagatccaggagacacagatccaccagggcttccagcacctcctgcaggcgctcaatcgacccagc

SEQ ID NO: 14853 - DNA, 144 bp, Bos taurus
  unsure (59): unsure at all n locations; Clone ID: 63-LIB34-064-Q1-E1-H4
ctgtttctgcaagacaacatcgtcgccgagttctccgtggacgagaatgggcacatgancgccacgggcaaggggcgaatccgtctcttaaataactgggacgtttgtgcagacatggtgggcaccttcacagacactgaggga

SEQ ID NO: 14854 - DNA, 204 bp, Bos taurus
  Clone ID: 63-LIB34-066-Q1-E1-H12
caccaacgatgagcgccctgcaagctgtcgtcactctcctgctctgcgggcagcttctcgcggtggaaaccggcagtgaggccacagccgacagctgcccaaaggcccccgagattgctaatagccatgtggagtactcggttcgctatcagtgtgacaaatattacaaactgcatgctggaaatggggtgtatacttttaaca

SEQ ID NO: 14855 - DNA, 201 bp, Bos taurus
  Clone ID: 63-LIB34-068-Q1-E1-H12
gttctagatcgcgagcggccgcctcgcggccgtcctcactgtggccgacatgcagcgcagggacgttgacttcgagctcatcaaggtagaaggcaaggtgggcgggcggctggaggacaccaagctgatcaagggcgtgatcgtggacaaggacttcagtcacccgcagatgcccaagcaagtggaagatgctaagattgc

SEQ ID NO: 14856 - DNA, 223 bp, Bos taurus
  Clone ID: 63-LIB34-069-Q1-E1-H4
agactaagtctgcacgccgccatcgcaaacgctaccgctcgctccgaagccgtggtcgaggccgcggccgaaaccagaacccctaccggcgatctcgatctgccttcctgtcctggctctccagcgaggagctgggcctgggagccaacaactatgatagcttcgagatggactggcttgtgcctgccacgctgtgagcccatccagagatgtctaacttctt

SEQ ID NO: 14857 - DNA, 246 bp, Bos taurus
  unsure (212),(219): unsure at all n locations; Clone ID: 63-LIB34-070-Q1-E1-H12
gcagatgacagggcagatcttgccaagtacatatgtgataatcaagatacaatctccagtaaactgaaggaatgctgtgataagcctttgttggaaaaatcccactgcattgctgaggtagaaaaagatgccatacctgaaaacctgcccccattaactgctgactttgctgaagataaggatgtttgcaaaaactaatcagggaagcaaanagatgcncttccctgggctcccgtttttgtatga

SEQ ID NO: 14858 - DNA, 413 bp, Bos taurus
  unsure (380): unsure at all n locations; Clone ID: 63-LIB34-071-Q1-E1-H4
aggatagtcgccgcggtttcctgcttcaacagtgcttgaacggaacccggctgctcgtcccccgctaccccggccggccactcagagccagccctcgtcaccacttgacagcgccctccgaccggcccaaggtccccgccaccgctccagtgccgctcggccgtcgccgccaccaccaccaccaccgcccgttttcagccgcccaccatgacgaccgcatccccctcgcaggtgcgccagaactaccaccaggactcggaggccgccatcaaccgccagatcaacctggagctctacgcctcctatgtctacctgtccatgtcgtactattttgaccgtgatgatgtgggcttgaagaactttgccaaatactttcttcnacaatctcatgaggagagggaacatgctgagag

SEQ ID NO: 14859 - DNA, 413 bp, Bos taurus
  Clone ID: 63-LIB34-072-Q1-E1-H12
gcgtctagaacgaatccacagacgaaccataattctagctcgaggcctacaaacgctccttccactaatagccacctgatgactactagcaagtctaaccaacttagctctacccccaacaatcaacttaattggagaactatttgtagtaatgtcaaccttttcatgatctaacattacaattattctaataggagtaaatatagtaatcaccgccctatattctctatacatgctaattataacccaacgaggaaaatatacctaccacattaataatatctcgccttcctttacacgggaaaatgcactcatatcattacacatcctacccctactactcctaaccctaaacccaaaaattattctaggacctctatactaaaaaaaaaaaaaaaaatggcggccgctct

SEQ ID NO: 14860 - DNA, 167 bp, Bos taurus
  Clone ID: 63-LIB34-072-Q1-E1-H4
tcgctctgcggccgcttcttttttttttttttttttcttttttttttgtttttgttttttccttttttttcttttgtttttttctttttgtgtttttttttcttcttttttttcttttgttttcttttttgttctgttgttttgttttttgttgtgggtgttttttt

SEQ ID NO: 14861 - DNA, 440 bp, Bos taurus
  unsure (80),(126): unsure at all n locations; Clone ID: 63-LIB34-073-Q1-E1-H4
cccacgcgtccacggacgcgaggggtctcacaggaagttctcctgctcccaggcatgggtcccctgggcttcctgcctcngaagcgcagcacccggcaccgcgggaaggtgaagagcttccccaangatgactcttccaagcctgtgcacctcactgcctttcttggctacaaggctggcatgacccacattgtgagggaggtcgataggccagggtccaaggtgaacaagaaggaagtggtggaggctgtgaccatcgtggagactccgcccatggtgattgtgggcatcgtgggctacgtggaaacaccccgaggcctccggacctttaagaccatctttgctgagcatatcagcgacgagtgcaaaaggcgcttctacaagaactggcataagtccaagaagaaggccttcaccaaatactgcaagaagtggcagga

SEQ ID NO: 14862 - DNA, 433 bp, Bos taurus
  unsure (411): unsure at all n locations; Clone ID: 63-LIB34-074-Q1-E1-H4
ttcccgggccgacgtcaaggttattaaagtgaagatttactgtttctttgttacttgctggtacagctaaagtttgttttacttgcacatttgtacatatacctaatgttttcaagtgccttaattgtttaaaatctctggcttcaaaggtttttgggaaaaggtaggcttacctcacatttttgtgtttctctcagtagtgatattctaggtacctcacaaaaatttttattatggtgccatggctgttagcttttagtaattgctttaagtacaaaattcagttgaaaatacacagaatttccattctcccaaaggggtaaaaattagctacaatggtgtaattgtcatttacttagatacgaataccttgccacacattaatgttaacgctatagctatttctgtganaatgtagctgacgaagcctctc

SEQ ID NO: 14863 - DNA, 187 bp, Bos taurus
  Clone ID: 63-LIB34-075-Q1-E1-H12
ctcttcagctccgattattcgatcggtgtgtttcgtcgacatacagacactattttcattgcgcagccgtttagccatttgggacaagatcatggtggcggcctgtttctgcatgccttttctcactatctccagcagtgtccattctgctcacatctgccattacgtgagcgaacctccctgcttt

SEQ ID NO: 14864 - DNA, 344 bp, Bos taurus
  Clone ID: 63-LIB34-076-Q1-E1-H4
tgggaaccgttggcatcacggtcgccctgctggtgtggatggccaccctgctgttcatctccatctggaagcacatctacagcagctggaaactgccccctggccctttcccactgcccatcatcgggaatcttttacagctggatattaagaacattcccaaatccttcaccaggctggcggagaggtacgggccggtgttcaccctgtacctgggctctcagcgtgccgtggtcgtgcatggctacaagcccgtgaaggaggtcctgcttgactacaagaacgagttttctggcagaggagaaaaaccctgggttccagatgcacaagaacaatgggatcat

SEQ ID NO: 14865 - DNA, 450 bp, Bos taurus
  unsure (344): unsure at all n locations; Clone ID: 63-LIB34-079-Q1-E1-H4
gggcacgcgtccggttaagagcacgtgccatggggctctggaggcgactggccttctcgttgttgttgctgctgctgctgtggggcctggggcagtcgccatgggcggcggcagcggccccagccctgcgctggctcctgggcgacccggcctgcggcctgctgctgggcctggccgtgctggcagggccctggctgggcccctggacaccgcactggctgagcctggctgctgcggccctgctactgaccctgctacccgcacggccgccgcccgggctcctctggctgccggccgacctggcctacaccttcctgatgctccgcctgggcctccgcacctgngcacgcttgcggcgccagccgccggacaccttcgtggactcctttgagcggcgtgcacgggcgcagccaggccgcacgatcctggtgtgcacccggtccggggggc

SEQ ID NO: 14866 - DNA, 388 bp, Bos taurus
  Clone ID: 63-LIB34-080-Q1-E1-H12
gacccacgcgtcagtgttcacggaataaggacgatggacactaactcaaagccgtcacaatcgtagtgctgactttggcaggaactgggatccagatacccaacgatttgggactattgcacccaatgcattagggatcaaatcctgtggtgtaccaagtgcgtactggctccgtaatgacagaattagccatcttaccattatgggacccacaaagcttttgattgaaatggacagactggaaaggcgatcaggtgacggcactctatgaaagatttactgtacacactgaggccaacacatatcaactgtcactgaccaaatacacaagaacatctggcactgccctcaaaaaacgggcttctcaactggtgggataaacacggac

SEQ ID NO: 14867 - DNA, 423 bp, Bos taurus
  unsure (343),(350): unsure at all n locations; Clone ID: 63-LIB34-080-Q1-E1-H4
tcgatagcagcagcagttgttcctctgatgactccagtgaggaggaggaggagcccaagggcaagggcactccaagaccgcaggccaccaaggccaatggcacctctgcactgactgcccagaatggaaaagcagacaggggcagcaacgaggaggaggaggagaagaaaaaggcagcagtggcggttgctaagccaggttcagaaaagaagaagaagaagaatgaggctgctaaggaggcagagacgcctccagcaaagaagataaagcctcagacccccaacacatttcctaaaaggaagaagggagaacgaagggcatcctccccattccgaaggatcanggaagangagatcgaggtggatgctcgagtggcagacaattcctttgatgccaagcggggtgcagctggagactgggggg

SEQ ID NO: 14868 - DNA, 420 bp, Bos taurus
  unsure (352),(412): unsure at all n locations; Clone ID: 63-LIB34-081-Q1-E1-H12
cacaacacttttgattgaaatggaggactggaaaggcgataaggtgacggcactctatgaaggatttactgtacagaatgaggccaacaaatatcaactgtcagtgagcaaatacaaaggaacagctggcaatgccctcatagaaggggcttctcaactggtgggagaaaaccggaccatgaccatccacaacagcatgttcttcagcacatacgacagagacaacgacggctggaaaactacagatcccagaaagcagtgttctaaagaagatggtggtggatggtggtataaccgatgccatgcagccaatcccaatggcagatactactggggtggagcgtacacctgngacatggcagagcacggcacagacgatggagtggtgtggatgaactggcaaggctcctgntactcaat

SEQ ID NO: 14869 - DNA, 267 bp, Bos taurus
  Clone ID: 63-LIB34-082-Q1-E1-H4
acaaacgagaaccctctatgacccgggtctcatgggctatgtcagtggctttgggatcatggaggagagaatttctcacaacctcagatttgtccgtctgccagtagctaagcgagagatttgtgagcgctggctccggcaaaaaaaacaggaatgatgtgttttctgaaaacatgttctgtgctgggaaccagccacaaggcaagattcctgccaagggatagtggagggtctttgctgtaagtgataagagaaatgaccgctggg

SEQ ID NO: 14870 - DNA, 399 bp, Bos taurus
  Clone ID: 63-LIB34-083-Q1-E1-H4
ccccttgaaaaaacataatgaacgaaaatttatttacctcttttattacccctgtaattttaggtctccctctcgtaacccttatcgtactattcccaagcctactattcccaacatcaaaccgactattaagcaatcgctttgtaaccctccaacaatgaatacttcaacttgtatcataacaaataatgagtatccacaattctaaacgacatacatgaacattactattaatatctctgatcctatttattggattaacaaacctactaggcctattaccccattcattcacaccaacaacacaactatcaataaacctatgcatagccatccccctgtgagcacgagccgtaattacaggattccgcaataaaactaaagcatcacttgcccatt

SEQ ID NO: 14871 - DNA, 349 bp, Bos taurus
  Clone ID: 63-LIB34-084-Q1-E1-H12
aaaccacgcgtccggttctagatagcgagctgtcgagccatattcggatgcagagcagctctgcaaagaggctaagggacatctggcctctccacgctcttcagccgagaacgaggccgtgacacagctggtcagagccaagaacaagcatgcttacctgagcatgaatgacatctccaaagagggcaagttcacctacccaacgggggggtcactggactattccaactgggcccccggggagcccaacactagggcataagacgaaggcccaaaggaactgtcttgagatctattccgatggcaattggaatgacatacaatgcagggaggagcgcctcgtgatctg

SEQ ID NO: 14872 - DNA, 335 bp, Bos taurus
  Clone ID: 63-LIB34-085-Q1-E1-H4
ctccacacacacaagtgcacactctcggacaaagcagtgagtcaaagcgggggctcaccagacgccagtggcgtaactgtcagcgacgttcaggaaatgatatggctcacagaggagatctaggcccatatcaaagccaatatagatcctgcatgagaatccaaaatggcatcgggataaatgagccactggaggactgcgacggatatccccggacaaatgtcgccatggtaaaagtctgaactgcaatgcacaacattatctgcatgcaaaatcaccacaccgctgtgaccaagcaagtagaacaagctctgcaacatctgcatgctcgcgac

SEQ ID NO: 14873 - DNA, 401 bp, Bos taurus
  Clone ID: 63-LIB34-086-Q1-E1-H12
ggtcgaggcccgcgtcagatcctaatggccgtagcattccttacgttagtggaacgaaaagttctaggctatatacaactccgaaaaggtccaaatgtcgtaggtccatatggcctacttcaacccatcgccgatgcaatcaaacttttcattaaagaaccactacgacccgctacatcttcagcctcaatatttatcctagcacctatcatagctttaggcctagccttaaccatgtgaattcccctaccaataccctatcctcttatcaacataaacctaggagtcctatttatactagccatatcaagcctagccgtatactccattctctgatcaggctgagcttccaactcaaaatacgcactaatcggagccctacgagcagtagcacaaacaat

SEQ ID NO: 14874 - DNA, 432 bp, Bos taurus
  Clone ID: 63-LIB34-086-Q1-E1-H4
cacgcgtccgcttaagtcgtgtcagactctgtgtgaccccatagacggcagcccaccaggcttccccatccctgggattctcctggcaagaacactggagtgggttgccatttccttctccaatgcaggaaagtgaaaagtgaaagtgaagttgctcagtcgtgtccaactcctagcaaccccatggactgcaggctaccaggctcccctgtccatgggattttccaggcaagagtactggagtggggtgccattgccttctcctagctaatggtaatttacatttgtataacattactcaatttttagtctcacaactgccaagtggatgtttctgggtattagaaagatcagtgttggaatattgattattgctaaatctttctactaaatttttaaaatccattttagaagtcagagtacacttttttt

SEQ ID NO: 14875 - DNA, 434 bp, Bos taurus
  Clone ID: 64-BOVMS1-002-Q1-E1-H8
agagttactgttgcattttctggcatactacctttaaaattcctgttgagtttcttttatgtttacaaggaaaggattaaattttttctcatcaaaactaggttttttccataaataaattgtcaggttaaatttgcactaacgtctgctctgacttttttgtacactccatgggcagacttcagatcagtctttcaataaatataattctaatatagtttcagcattccctttatatacctgtgttaaactcctgcctttgtctcttactcctttccacacatacgcacagattctgtacctttatgatggatcataaagattgtcatgacattggaaacttttccttttctcacatactctgtcatttgctgcaacaatgaaaatcttactttgactattaatgcctattcattcctctaatacatggagaa

SEQ ID NO: 14876 - DNA, 261 bp, Bos taurus
  Clone ID: 64-BOVMS1-004-Q1-E1-H12
cgggctcgaccacgcgtccgaagaactatgtgtcgcagcattgtacgccgttgcacctgcccggctccatgtctgaactgaaggagctctgcaggcatctgcacgccaagatcaacgctgacgaggaggagaagtctgacatgaagatagcggtgcagacgatcatcatggagcttgaggacatgacccagaatctgttcgacctgatgggcaagttcaagcggcccccattgcgacgcatgcgcatatccgccgatgcca

SEQ ID NO: 14877 - DNA, 309 bp, Bos taurus
  unsure (305): unsure at all n locations; Clone ID: 64-BOVMS1-004-Q1-E1-H8
gacccacgcgtccgattaatagaggataacccaccttccaacaattcccgaaacagtcccttaattggatgattacagcaacaaaaaacttctgaagcctttctccacaatcctgagctgtggattccataatattataacggatttaagctgtgaagcctcaaaacatcacaactagattagcatcggtgttctcagatttgggaaaactgcctaattaacattaccctatagtggaattactcaaatttgaattcacctatgaaacatacaaatcaaagtaacagtataaatgtgacatgcanatga

SEQ ID NO: 14878 - DNA, 405 bp, Bos taurus
  Clone ID: 64-BOVMS1-006-Q1-E1-H8
atgcgacgtcatagctcttctatagtgtcacctaaattcaattcactggccgtcgttttacaacgtcgtgactgggaaaaccctggcgttacccaacttaatcgccttgcagcacatccccctttcgccagctggcgtaatagcgaagaggcccgcaccgatcgcccttcccaacagttgcgcagcctgaatggcgaatgggacgcgccctgtagcggcgcattaagcgcggcgggtgtggtggttacgcgcagcgtgaccgctacacttgccagcgccctagcgcccgctcctttcgctttcttcccttcctttctcgccacgttcgccggctttccccgtcaagctctaaatcgggggctccctttaaggttccgatttaatgctttacggcacctcgacccc

SEQ ID NO: 14879 - DNA, 378 bp, Bos taurus
  Clone ID: 64-BOVMS1-008-Q1-E1-H12
ccacgcgtccacagatggccttttttgaaacttgtttctaaaattcaggtcccagactattatgacatcatcaaaaagcccattgccttaaatataattcgtgaaaaagtgaacaagtgtgaatataaattagcatctgagtttattgatgatattgaattaatgttttcgaactgctttgagtacaaccctcgtaacacaagtgaagcaaaagctggaactaggcttcaagcattttttcatattcaggctcaaaaacttggactccatgtcacatctgggaatgtggatcaagttagcacaccaccggctgcaaaaaagtcacgaatctagttttgtccttctgaaggatatgaagaaatcaaattgttcatgaaa

SEQ ID NO: 14880 - DNA, 410 bp, Bos taurus
  Clone ID: 64-BOVMS1-008-Q1-E1-H8
cccacgcgtccggcaaatgatactggcagcctgggagttcatagatggacttgggacccagcagatttgaaacatgtatatggagtttaagaaatttattttccaggtgcaacccccgtctaactaaattttttcttcaccttgtacgcttgacagctgaaaagaccataacatgggagtaataatgggtcaaaatttacaaaataaagtactgttttggtgtgggagttgtcatgaggctatgttgaagtgactttaaccatgtgggatattgagtttttttaatggattgaatatccattaaaatggatttgttcagccatttacattaatgagcatttaaatgcaacagataccatttcaggtgacttaacgtgaatgaataaaagtcaatgctattggattattaa

SEQ ID NO: 14881 - DNA, 364 bp, Bos taurus
  unsure (341): unsure at all n locations; Clone ID: 64-BOVMS1-009-Q1-E1-H8
gacccacgcgtccggggatgctgtcgctgtctggactggacgccatccagcgtcctccaaagattcaagtgtactcaagacacccaccagaagatggaaagccaaattacctgaactgctatgtgtatgggttccatccaccccagattgaaatcgatttgctgaagaatggggagaagattaaatcggagcagtcagacctgtctttcagcaaggactggtctttctacctgctgtcccacgctgagttcactcccaacagcaaggatcagtacagctgccgagtgaaacacgttactttggaacaaccccggatagttaagtgggatcgagacctgtangcagcaccatcgagatttgaaca

SEQ ID NO: 14882 - DNA, 446 bp, Bos taurus
  Clone ID: 64-BOVMS1-010-Q1-E1-H12
cataaatagaagcagctcaatctgcctccgtcatgcgggcctaggatcactcatcgcatactcctctgtaagccacatagcactcggtatcgtagccatccttatccagacaccttgaagctacataggagcaaccgcccttatgattgcccacggcctcacatccgtccatacgtttctgtcgagcatgctcaaactacgaacgaatccacagccgaaccataattctagctcgaggcctacaaacgctccttccactaatagccacctgatgactactagcaagtctaaccaacttagctctacccccaacaatcaacttaattggagaactatttgtagtaatgtcaaccttttcatgatctaacattacaattattctaataggagtaaatatagtaatcaccgccctatattctctatacatgctaattataagccaacga

SEQ ID NO: 14883 - DNA, 346 bp, Bos taurus
  Clone ID: 64-BOVMS1-012-Q1-E1-H12
caagaatagcattgcatacatggatcatgccagtgggaatgtaaagaaagccttgaagctgatggggtcaaatgaaggtgaattcaaggctgaaggaaatagcaaattcacatacacagttctggaggatggttgcacaaaacacactggggaatggggcaaaacagtcttccagtatcaaacacgcaaggccgtcagactacctattgtagatattgcaccctatgatatcggtggtcctgatcaagaatttggtgcggacattggccctgtttgctttttataaaccaaactctatccaaagtcccagaaaaagcttcacactccatatgttccttttgttcca

SEQ ID NO: 14884 - DNA, 447 bp, Bos taurus
  unsure (398),(406): unsure at all n locations; Clone ID: 64-BOVMS1-012-Q1-E1-H6
catggactaatctttctatctttctgatctgtaaatacttaaaaaaaaagagtagttttgtatcaacctaaatgagtcgaagttcaaaaataatacatttcagtcttttcataattgttgacctaagaagattacacattttctagtgacatgtacatactgtatatagccggattaacggttataaagttttgtaccatttattttatgacattttacactgtaactattgaaactaacggttggtaggagaaagtttcttatggaacgaataccctgctcaacacttaatcaatctttgtgcctcaacatactgttgatgtctaagtatgcctcagtgggtcgaggaattccccattgaagatgtcctatccaccgaaaaatgctgtgcacatcanctgatatngcacgatacttatggaatcagaaatgtaaggcattggtgat

SEQ ID NO: 14885 - DNA, 284 bp, Bos taurus
  Clone ID: 64-BOVMS1-014-Q1-E1-H12
tgcattcaacatacatcaactctaaggtaccttacttccttttgtttctgatatttcttgtaggcatctatcagtatggcttaatgattggcttggcattctaccatttttcattgctccggctatcctgcgaagggggaattcactgggagtctgttaacaagatctaacctcagcactattagtactctctcttattagacacgctatttaacaccacccgttcggcttggtgaaagagactattcattgttcaaagagtcagtgcactttttctcttgaca

SEQ ID NO: 14886 - DNA, 213 bp, Bos taurus
  Clone ID: 64-BOVMS1-016-Q1-E1-H8
atgcgacgtcataactcttctatagtgtcacctaaattcaattcactggccgtcgttttacaacgtcgtgactgggaaaaccctggcgttacccaacttaatcgccttgcagcacatccccctttcgccagctggcgtaatagcgaataggcccgcaccgatcgcccttcccaacagttgcgcagcctgaatggcgaatgggacgcgccctgt

SEQ ID NO: 14887 - DNA, 325 bp, Bos taurus
  Clone ID: 64-BOVMS1-018-Q1-E1-H12
atgcgacgtcatagctcttctatagtgtcacctaaattcaattcactggccgtcgttttacaacgtcgtgactgggaaaaccctggcgttacccaacttaatcgccttgcagcacatccccctttcgccagctggcgtaatagcgaagaggcccgcaccgatcgcccttcccaacagttgcgcagcctgaatggcgaatgggacgcgccctgtagcggcgcattaagcgcggcgggtgtggtggttacgcgcagcgtgaccgctacacttgccagcgccctagcgcccgctcctttcgctttcttcccttcccttctcgccacgt

SEQ ID NO: 14888 - DNA, 184 bp, Bos taurus
  Clone ID: 64-BOVMS1-019-Q1-E1-H8
caagaagtgaactttcctttccctgatttataaataatctgtctgctggtatgacagacaaagaaatttctactctgagagtttttgtagacttggaaaaatacaaaaattataagtcctgtctatctttacaataaaactctccttattagaaaacaacaataaaacttccaaacaattgaac

SEQ ID NO: 14889 - DNA, 386 bp, Bos taurus; identical to SEQ ID NO: 3516
  unsure (370): unsure at all n locations; Clone ID: 64-BOVMS1-020-Q1-E1-H8

SEQ ID NO: 14890 - DNA, 169 bp, Bos taurus
  Clone ID: 64-BOVMS1-022-Q1-E1-H12
ccttcatcgagctggatgtcccacctctctgacctctgcagtttgtctgttctccagctgaccctgattctttcttttcacatcctgccttagggccaggtacacactgtgcttcctgttgtacagaagctcttcacttcagtgtaaaataaacactatgtaagctgtt

SEQ ID NO: 14891 - DNA, 396 bp, Bos taurus; identical to SEQ ID NO: 13720
  Clone ID: 64-BOVMS1-023-Q1-E1-H12

SEQ ID NO: 14892 - DNA, 327 bp, Bos taurus
  Clone ID: 64-LIB188-015-Q1-E1-H8
acgtgaataaagaaattaaaaatgccctcaaggaggtgaaacagataaagacccaaatagaacaaaccaatgaagagcgcaaattactgctcagctccctagaagaagccaagaagaaaaaagaaggacgccctgaatgacacaaggaatctgaaaacaagctgaaggcgtcccaaggggtgtgcaatgagaccatgacagccctttgggaggaatgtaagccctgcctcaagcagacctgcatgaagttctacgcgcgggtgtgcagaagcggatcgggactggttggccaccagcttgaagagttcctaaaccagagctccccct

SEQ ID NO: 14893 - DNA, 270 bp, Bos taurus
  Clone ID: 64-LIB188-001-Q1-E1-H12
accttgacgtggcagttgtcaagaaagcaaatgaggggctcacatggaattctctgaaagacaagaagtcgtgccacaccgccgtggacaggactgcaggctggaacatccccatgggcctgatcgtcaaccagacaggctcctgcgcatttgatgaattctttagtcagagctgtgcccctggggctgacccgaaatccagactctgtgccttgtgtgctggcgatgaccagggcctggacaagtgtgtgcccaactctaaggagaagt

SEQ ID NO: 14894 - DNA, 465 bp, Bos taurus
  Clone ID: 64-LIB188-001-Q1-E1-H8
catggccgggcgatactcggtatggatcggagactccatcctggcctccctgtccaccttccagcagatgtggatcagcaagcaagagtatgacgagtctggcccctccattgtccaccgcaaatgcttctaaatgggctgcgagcagatgcgtagcatttgctgcatgagttaattcagaagtataaatttgccgtggcaaatgtatacacctcatgctagcctcatgaaactggaataagcctttgaaaagaaatttgtccttgaagcttgtatctgatatcagcactggattgtagaacttgttgctgattttgaccttgtattcaagttaactcttaccttggtatatgtttaataccctgtgcatatctttgatttaaacccctagttatatgccgctctcagctcgaactgacgtgagaatgtttatggaagagaactcaatggcttgataagaatctg

SEQ ID NO: 14895 - DNA, 424 bp, Bos taurus
  Clone ID: 64-LIB188-002-Q1-E1-H12
gccatgggcgcgggataccaaaagaccttcctcctgatactgcgctgctggacctgcaaaacaacaaaataactgagatcaaagatggagactttaagaacctgaagaaccttcatacactgattctcatcaacaacaaaattagcaaaatcagccctggggcatttgctcctttggtgaaattggaacgactttatctttccaagaatcaactgaaggaattgccagagaaaatgcccaaaactcttcaggagctgcgtgtccatgagaacgagatcaccaaagtgcgaaagtctgtgttcaatggattgaaccagatgatcgtcgtagaacttggcaccaacccgctgaagagctcaggcattgaaaatggagcctttcagggaatgaagaagctctcctacatccgcattgctgacacaaa

SEQ ID NO: 14896 - DNA, 324 bp, Bos taurus
  Clone ID: 64-LIB188-002-Q1-E1-H8
gggatacaaagcattctttgttttttttattctttttattttttttggttttcataaatgtcgatttcattattggtgggtagcgcatttaacagttaaatacatttaaataatgtataggtgactgcatgactgcagtattggtaactagatagacaacaatttgactaagaaccacactaacagttactgtccaaataattaaaatacagctcttgtttaaatcaacccttgttttgatcaccttcggggggtgcggtaggggaagcctgctggtcacactggaaatatattaaggccaaatcttctgatacccatttccag

SEQ ID NO: 14897 - DNA, 385 bp, Bos taurus
  unsure (156),(161): unsure at all n locations; Clone ID: 64-LIB188-003-Q1-E1-H8
gtttatcgggaagatgctacactcgtcacaaccagtgaacatcactgtctaagagtccagctcgagcggcccctcatcgatgacagctgtggctataggcacctgttttgctgcagtggctattgttgcggccataataacctggttccgcctcangaganagccaatctcagaagttggagcatggcatacagggattccttgtgtcctggagatgaatgaagacactagatgcattgtctcagactccttccccacttcctgaggaatgctgctttgcagatactgagctgctttccgcactggcaaaccggtctcactgatgctgaaaatgatactgccagaactgaggctgagaacacagtcacctattcactcctctcgc

SEQ ID NO: 14898 - DNA, 407 bp, Bos taurus
  Clone ID: 64-LIB188-004-Q1-E1-H8
cggatacttgagctagacagagtcactcgagcccctccagggagctgtggctaaattcttctctgccagctgtgttccctgcattgatagacaagcataccccaacctgtgtcaactgtgcaaggcggatggggagaaccagtgtgcctgctcctcccgggaaccatacttcggttattctggtgccttcaagtgtctgcaggacggcgctggagacgtggcttttgttaaagagacgacagtgtttgagaacttgccagagaaggctgacagggaccagtatgagcttctctgcctgaacaacagtcgggcgccagtggatgcgttcaaggagtgccacctggcccaggtcccttctcatgctgtcatggcccgaagtgtggatggcaaggaagacttgatctgga

SEQ ID NO: 14899 - DNA, 380 bp, Bos taurus
  Clone ID: 64-LIB188-005-Q1-E1-H8
gatactgaaacaacgtcctgggtgatcctgggcgccctcatcatgacaattggatggacaccttagctatgcgtctgcaacatctgcggaaaagcgttcaccagacccatggttactgcaatgacacatcacagctcacactgtcgagaatgcttatacctgcactcaatgcagcacgaccttcgcatacacgtcaacgctgatggcacacatgcagacgcactcggtcgtcaggaactatcagctcaaacagttgctccataaccctcgcgctgatctaccgtctgcagaagcatcacgactctagttgctgtgccgtgcactagtgacacagcccctgtgtacgcgagcagactcctttcatgttcacttgtcaggca

SEQ ID NO: 14900 - DNA, 403 bp, Bos taurus
  Clone ID: 64-LIB188-006-Q1-E1-H12
gggatacttggtgagaagggccggcggatccgggaattgactgctgtggttcagaagagatttggcttccctgaaggcagtgtagagctttatgctgaaaaggtggccacaagaggactgtgtgccattgcccaggcagagtctctgcgttacaaactcctaggaggccttgctgtgcggagggcctgctatggtgtgctgcggttcatcatggagagtggggccaaaggctgcgaggtcgtggtgtctgggaaacttcgaggacagagggctaaatccatgaagtttgtggatggcctcatgatccacagtggggaccctgttaactactatgtggacaccgccgtgcgccatgtgctgctcagacagggtgtgctgggcatcaaggtaaagatcatgctgc

SEQ ID NO: 14901 - DNA, 236 bp, Bos taurus
  Clone ID: 64-LIB188-006-Q1-E1-H8
gggatacttgttcttccggatcatgtgccggatgctgctgagggtggcccgggcgttcttgttgatggtggttcgcacgtaggaagtggctggcttgcgctggcccgatctccgcttcatcaccaccacgacccctttgccgtccgccgccggctccacacccacggtcttgcggtgaatgagcccattgtagcgaaaggagttgcgcgctttcaggttattcggctcggtgctgt

SEQ ID NO: 14902 - DNA, 340 bp, Bos taurus
  unsure (224),(246): unsure at all n locations; Clone ID: 64-LIB188-007-Q1-E1-H8
ggatactcgtccacacgctcacgttcatcgaacaccggttctgcctcgttagcatccaggtatttcatctcccgctcggtgaagatgcgggtcagcaccaccatgcggagcggcaccgtgaggatgatgatgaaggggaaggccacggaggccgcggtggacatgacggcccagagcacggccaggcagagcagctgcagggccgtgaacaggtgcatacgcanggtccggaccctcttgacgtangtgacgtccgggtggtgtttgggcggcatgaacaacaagtgcaaccgctcatagaactggatcccattcagggaggtcacgcccatgtatcact

SEQ ID NO: 14903 - DNA, 409 bp, Bos taurus
  unsure (369): unsure at all n locations; Clone ID: 64-LIB188-008-Q1-E1-H12
gggatacatgaacacaagccaggggtcttcccaccacaaagagttcctcttcaacatacatggggagaacctctttggagctgagttccagctgcaaatttgtgttccagttaaattacaaggtttccagttcctaacagtgacgaacctgaccaagattcaggcccacaccgtgtgcactcaggctctcgagcgcgtttgtgggagcggcctggttcagcttgtggaagaatggcattcagtaagctgtaaggtcacctcggataaagaaaatgtaaccgtggctgcagagctctccttgaatcagctaaagcagttactaagagatgtgactgagctgcagatccttggtgaaatatctttcaacanatctctgtatgaggggctcaacacagagaaccacagaact

SEQ ID NO: 14904 - DNA, 428 bp, Bos taurus
  unsure (306),(318): unsure at all n locations; Clone ID: 64-LIB188-008-Q1-E1-H8
tattacaacctggatgaaacttgtatccgcttctatcacccggataaagaggacggaatgctgagcaaactctgccacaaagatacctgccgctgtgcagaggagaactgcttcatgcaccacacggagaaggaggtcactctggaggaccggctggacaaggcttgcgagccgggcgtggactatgtgtacttggacagaccgagggaacctgaattctgagacagctcgacagtgacctcaacagaccatccatctgggggtggaacggatctgtcaggacgccgggacgccaaggggctgccnccaggatggaanggcgcccccctcctagcaccctttggttttctggtgggtctcacgtcacacaggagtgcaacggactcaggacagacatgctccttaatgcatcgggagcgcccgggggc

SEQ ID NO: 14905 - DNA, 286 bp, Bos taurus
  Clone ID: 64-LIB188-009-Q1-E1-H8
gccatgggcgcgggatacttctccatagagttgggcacacacttgtccaggccctggtcatcgccagcacacaaggcacagagtctggatttcgggtcagccccaggggcacagctctgactaaagaattcatcaaatgggcaggagcctgtctggttgacgatcaggcccatggggatgttccagcctgcagtcctgtccacggcggtgtggcacgacttcttgtctttcagagaattccatgtgagcccctcatttgctttcttgacaactgccacggcaaggt

SEQ ID NO: 14906 - DNA, 415 bp, Bos taurus
  Clone ID: 64-LIB188-010-Q1-E1-H12
gccatgggggcgggatacagaccaaacgagtctcctccgtggacccgtcccagaccagagccccccacccctatggagtccctactccctcagctggggcttactccatggctggagtcatgaaaaccatgacaggaggcacagctcagagcattggccggaaaggcaaggtagaacagttgtccccagaagaagaagagaaaaggcgactccgaatggaacggaataggatggctgcagccaaatgccggaaccggaggagggagctgactgacaccctccaatcggagacagaccacctacaatatgagaagtcagctttgcagacagagattgccaatctgctgaaggagaatgaaaaactcgatttcatcctagcggctcatcgacctgcctgcaagatccccgatgatct

SEQ ID NO: 14907 - DNA, 348 bp, Bos taurus
  unsure (220): unsure at all n locations; Clone ID: 64-LIB188-012-Q1-E1-H12
ctgggtataattcagctgccggatgagctcattgatgcgttcacctcgatagcctgatgagcccacttccttgaggaagcccactctattcctgggatcatcatcctcgactgttaaactaggctattaaggaccgtttaacccaacaaacaggtttatttgcaagttcaaatgcatgaacaaatgaaagtgctatgactacaacttaagagcaatacangtattaatataacaacagcaatgaatttcaagttgaggaatactgaaacacacccttgggtatacccacgtattgatgggagtcgctacgaaatggacacagatagctgattgccaatgagaacgaac

SEQ ID NO: 14908 - DNA, 446 bp, Bos taurus
  unsure (367): unsure at all n locations; Clone ID: 64-LIB188-012-Q1-E1-H8
gccatggatcctggataccagtttaataactggaatggggaagagctgcccgcagaacccaaagaactggtcttgatgatccagaatctcaaacaaaaacttcccaagaagaattctgccgaagggaataaatatcacaggaatgtgcctcttctcatccactgcagagatggatctcagcaaacaggaatattttgcgcgttgttcaacctcttagaaagcgctgacacagaagaagtgatagatgtgtttcaagctgtgaagtcgctccgcaaagctcggccaggaatggtccccaccttcgagcaataccaatttctgtatgacgtcattgctagcacctatcctgccaagaatggacaagtanagaaaagcaagcatccagaagatagggttgagattgataacgaggtggacaaagctaagccggatgctaactgcacaac

SEQ ID NO: 14909 - DNA, 354 bp, Bos taurus
  Clone ID: 64-LIB188-013-Q1-E1-H8
tgggcgcgggatacgtgctgttgaactgctcctctctcggcttcgtcctggccgtgtgcacctccacgtcgtccacgaaccaggagaactgcacctcggggttatcgtggcccacgttcaccaccacacacgtgacctcgggcgttcctgtgatcatcagggtgtctttgggtttcggtgggaagatgaagacagatggttccctcacgcaatgctggttattaggcttggagcagtcactggagaccccaacagccttgtccaccttggtgctgctggccgggtgggctacgttgcaggtgaaggtctgtcctgagctgctggcgggcacgatcaccatgctgctgagagagt

SEQ ID NO: 14910 - DNA, 389 bp, Bos taurus
  Clone ID: 64-LIB188-016-Q1-E1-H12
ctccatcctggcctcactgtccaccatccagcagatgtggatcatcaagcacgagtatgacgagtctgcgccccccagtggtcaccggaaatgcttcgaaatggactgcaagcaaatgcgtagcaattgctgcatgagttaattcataagtataaatttgccgtggcaaatgtagacacctcatgctaccctcatgaaactggaataagcctttgaaaagaaatttgtccttgaagcttgtatctgatatcagcactggactgtaaaacttgttgctgattttgaccttgtattcaagttaactcataccttggtatatgtttaataccctgtgcatatccttgatttaaacccctagttatatgcggctctctcacctcgagctgaag

SEQ ID NO: 14911 - DNA, 412 bp, Bos taurus
  Clone ID: 64-LIB188-016-Q1-E1-H8
cggcggcgggatacgagcccatcgatgatggttccgaaagccaggtgttctgttcctgctcctacgatgccaccacacactttgagacaacctgcaacgacatcaaagacatctacaagcgcatggcaggctccgcctttgactttgagaacatgaagcgcaaacagaatgatgtctttggggaagctgaccagtgatggctgacccctagcccagcccctggtgccctctcccccaacctgtctgttctccctgaaggctggggagacaggtgtggctgggcgtccctgtttccaacatcttctgcttcccctaccacattcctgtcatccacctcattgattcactgaccaaatccttaaccttagtgatggtttgggagatggggcggggggttggttagtatcctcct

SEQ ID NO: 14912 - DNA, 196 bp, Bos taurus
  Clone ID: 64-LIB188-017-Q1-E1-H8
gccgaatctaccttcgaggggatcctcaaaaacccaagagcagagtctttgaacagcaggtccctctggccgggtggaaaagcaaaaaacctggaagctccgagacttgttttttccaaatttctcctgcgccttgctgagaagcttccagatcaagtcttccttgcaatcaacacttcgggcaacgacagcatga

SEQ ID NO: 14913 - DNA, 422 bp, Bos taurus
  Clone ID: 64-LIB188-018-Q1-E1-H12
tccccctagtccttgagcaggtaggacacactgtagagcctgctgcccacgtgtttcaccaggatctcttcacagggcgtccggggcccatgcacgcccaccagcagtatgttgttgcctgctttgctacagtcaaccgtgaagctgctcttctggcccatgtaggccttgctcagccccacgcctttggccagcaccttgctggcatcagtgggacccgggcctggggcactgtgctgggggatggtggcagtcttggtcagggagtccacaaacacagatgatgtctcatggaggctgtggttgctgacgaggcggtgacctgtgactctggccttgaaggggctgcccgcaatgtggtaggggccgccgtactcctggttctgccgctcggtgtcagctcgcacgtcactcagctgggc

SEQ ID NO: 14914 - DNA, 412 bp, Bos taurus
  Clone ID: 64-LIB188-018-Q1-E1-H8
ccacctggccccaccctagacctgggatggttatgatcctagctggaattagcagcacctgcgtgtccatcgtgggccccctccttgccatctcatggcctaagatgggaccgcagtctctgggcttcatcgtcctctctgtgtttctctcttgggtccatttatctttttttttttttttctttttccgagtggcattcaggtgcacagatgataaggtgagggggtcaaatcaggggactctttctgggatatgttgggggagttattgaacaagaaaccactgtgtggtacgagggacttgagcttatcatggccacacacatccacattccaggttttctcctaggacatcggtggagaggttgacaactttagttctcttgatcaggcctcttttccctctcctggc

SEQ ID NO: 14915 - DNA, 414 bp, Bos taurus
  unsure (94): unsure at all n locations; Clone ID: 64-LIB188-020-Q1-E1-H12
cgggctcgggatacaatgataccggttcctccatcgtccaccgcaaatgcttctaggcggactgttagctgcgttacaccctttttcttgacanaacctaacttgcgcagaaaacgagatgagattggcatggctttatttgtttttttttttgtcttttttgattttttttttttttggcgcttgactcaggatttaaaaactggaacggtgaaggtgacagcagtcggttggatcgagcattcccaaagttctacagtgtggccgaggacttgattgtacatggttttgttttttttttaatagtcattccaaatatcgcgaaatgcattgttacaggaagtcctttgccttcccaaaagccaccccgcttctctctaaggagaaggggccagtcctcgcccgagtccacac

SEQ ID NO: 14916 - DNA, 313 bp, Bos taurus
  Clone ID: 64-LIB188-020-Q1-E1-H8
gcgcgggatatgcactagaactgacgcctgcatgcctgctaactcagatggtaaaaaatccacctgcaatgcggaaaacctgggttgggaaaatcccctgaaaaagggaaaagttacccactccagtattcttgcctggagaatccccatggacagaggagcttattggacttcagtccatggtgtcacaaagagtcggacatgactgagcgactaagcacagcacacaaagggaaattgggctttagagttgactcttgtgtcagttaccactttttttttgtaaatgctatctaccttcccatcaagggct

SEQ ID NO: 14917 - DNA, 418 bp, Bos taurus
  Clone ID: 64-LIB188-022-Q1-E1-H12
gccatgggcgcgggatacagaatttggaggatcaatttatcagaaagtatgtgaagatcttgacacttcagtaaaccttgcttggacatcaggaaccaactgcactcgctttggaattgcagctaaatatcaactggatcccactgcttccatttctgcaaaagtcaacaactctagtttaattggagtgggctatactcagactctgaggcctggtgtgaagcttacactgtctgccctggtagacgggaagagcattaatgctggaggccacaaacttgggcttgccctggaattggaggcttaattcagctgaaagaaacctctggaaatgggtatcagaagatttggccttaatatatttccagttgtgacagcaggccttccccaacccaacccccgaaggtgattaaaacaa

SEQ ID NO: 14918 - DNA, 331 bp, Bos taurus
  Clone ID: 64-LIB188-022-Q1-E1-H8
ccatagacacgggatacgtagttacttggaagatccacaatcacgagacaatgtctctttgctatacaacgttgaaaatctacctggatctaatgattccatccagaagcatgctggcatgttgatcctaaactgaattgccacagtctttgcaaaatacctcgagttccaatcatatggcaaggaacgagagaacagggaatttatccattatagggatgacgacacaatgtatgttgattcaaaaacagacagcatcacagtatgcttcaacatattgtataaggatgatcaccatgtggacaatggtaaagtgttcatgcaggatttc

SEQ ID NO: 14919 - DNA, 411 bp, Bos taurus
  unsure (4): unsure at all n locations; Clone ID: 64-LIB188-023-Q1-E1-H12
atanaggccggacgggcaggtctgtatctcatacgcatcgaccccgtcctgtgcacccatgtcatctacagctttgccaacataagcaacaatgagatcgacacctgggagtggaatgacgtgacgctctatgacacactgaacacactcaagaacaggaaccccaacctgaagaccctcctatctgttggaggatggaacttcggttctcaaagattttccaagatagcttccaagacccggagtcgcaggactttcatcaagtcggtgccaccatttctgcggacccatggctttgatggactggacctagcatggctctaccccgggtggagagacaagcggcatctcaccactctggtcaaggaaatgaaggctgagtttgtaagggaagcccaagcaggcacagag

SEQ ID NO: 14920 - DNA, 394 bp, Bos taurus
  Clone ID: 64-LIB188-023-Q1-E1-H8
catggccgccggataccctggggtattatgttaaccatggcttcctggtgactcagatggtaaagaatccacctgcaatgcgggagacctgggttgggaaaatcccctgaagaagggaaaagttacccactccagtattcttgcctggagaatccccatggacagaggagcttagtggacttcagtccatggtgtcacaaagagtcggacatgactgagcgactaagcacagcacacaaagggaaattgggctttagagttgactcttgtgtcagttaccacttttttttgtaaatgctatctaccttcccttcaagggctgtgtgtgtgtgttttgtttttaaagatgactgagtaactctgctgctctgaatttgcttcttagcaccactca

SEQ ID NO: 14921 - DNA, 371 bp, Bos taurus
  Clone ID: 64-LIB188-024-Q1-E1-H8
cgcgacgacatcagctctttgttctctggagtcagttttagccacacaaagccagctggctggctgttgaagagtcagaggcaatttggggttaagaacacttttccacagcacttacccagaaataaccttcatctctggataaacttttcaaactaagaggtctctcttctatgtgctactgagaaaccaaaactgaggaaaaggacagtcttactttaatcaagttccagaatgaggacacacagctttgcaaagcactgtctcagcagaagacgcaaggatgtgtgcacagaatgtttctagaaaataccaaaggccccaaacatagccgcgacgttgccttctgctcctcctcgacgccactcggt

SEQ ID NO: 14922 - DNA, 419 bp, Bos taurus
  Clone ID: 64-LIB188-025-Q1-E1-H8
ggatacttgtcatctgactcaggctgcccatttctctgccactccacggcgatgtagtctgggtagaagctggtgaccatgcaggtgaggctgaccgtgcttttgctgagctcttcctggggtggggccaggacatacacctgcggctcccgggccggccctttggtcctggagatggtcctcacgatgggggccgggaggccttcgttgtggaccttgcacttgaactcctttcctccagtccagtcctggtgctggatgcgcagggcgctgaccacgcggtaggtgctgttgaactgctcctctctcggcttcgtcgtggctgtgtttacctccacgtcgtccacgaaccaggagaacttcacctcggggtcatcgtggcccacgtccaccaccacacacgtgacctcgggcgttcc

SEQ ID NO: 14923 - DNA, 266 bp, Bos taurus
  Clone ID: 64-LIB188-026-Q1-E1-H12
ctgccgcgccatgtcctgcttggcgttcctcagagcggcctccagctcggccagcttggcctgagcatccttaacagccatctcaccacgctgctcagcgtcagcgatggcagcctccagggaagccctctggcctttgagaccctcgatctcagcctggagacggttgatgttccggttcatctcagaaatctccgtcttcgtgcgacgaaggtcatccccgtgcttcccagccagtgtctgcagctcctcatacttgatttggt

SEQ ID NO: 14924 - DNA, 410 bp, Bos taurus
  Clone ID: 64-LIB188-026-Q1-E1-H8
gaaacctcattccaaacttaagatgatgccctgaatgcagggcggtgtttatattcatcgtgaggggtgtctgtgatgtttggagtttgaaaatggatttagacagtgctaagcggagtccactgggtttggttctgtgccgtttttgagcaagtcattcattcactggctttggttccgttgaagtcagcatcgcgagcgtccatttcctcctcagacccatctgcgttctcaataactctacgtcctccagaccttcttgtgggaacaaaagaggtctcgttccctcgcctgagcttgctcttgagcgctgtcacctcgcggcccatggcctcgttgctctccgtggcctcgtccagctcacgctgcagtttcctgcggttggcattgatgcgctgggactcctcctc

SEQ ID NO: 14925 - DNA, 386 bp, Bos taurus
  Clone ID: 64-LIB188-027-Q1-E1-H12
acattaaaactttggtgaggtctggggagaagcgggactctacccctggttcctgactcaaaccctctcactcagctgcatgctgaacccagtgtccacagtatctccagccctacacaaggccaggcccatggagcactcccaagtgaggtcctaagagtcagggaatagggtggaagggaccgcagggcatcttctgagagaaagcactggaacaggtcagtttccgctccacaggctgctggagacacagttcgctgcccgcagagatgatgggcaagtgattgtccatgtggtagctgatgaggtgactgacactctcaaagcggtgatcctttgtccgaagcacaccctcatggctccacaggagcaggtgcttgggctgc

SEQ ID NO: 14926 - DNA, 393 bp, Bos taurus
  Clone ID: 64-LIB188-027-Q1-E1-H8
gatacaagaggaactaggaagtcaatgtaaccaggcagctaatgatacgatacattcagtattttggacctgtattaagagctgactatggcgtccagcattaacttgtgccacgtgtaaaattcagagagaattttgtgcaagacttcacgacactgaggacagtttttaaatcatatggactgggataagttaggcacttatctttctacttagaaatgtgaagtgacaagtattccagggcacatcacaccaaggcataaaccatgctgtaaaggtgggaatatttttagggtgcccagcctccttgttcaaaaagccatgagaaagacaccaagcaaatggtcagagcagccattctggtggtgacattatcctcagacgaagcaagct

SEQ ID NO: 14927 - DNA, 351 bp, Bos taurus
  Clone ID: 64-LIB188-028-Q1-E1-H8
tacatcgaactgcacgattggaccagctgcttcggcatcaaggacaaggacatcgacaacgacctcgtgatctaaagccatgcctcctcctgcacaaccatattctctctctttgaccttccccctcctgttttccccaatgtttaaaatgtatggatggtttgttgttctgcctgcggtcaaggtgctaatatatacttaaacgactacattaacggtgctaaacacagacattttaacccaagtcacgacattcataactgtaactcagctctcacggccccttgctcacccatgaatggtcccgttttcctcttgccgcgtgcacctccacccattgtcctggtggca

SEQ ID NO: 14928 - DNA, 435 bp, Bos taurus
  unsure (386): unsure at all n locations; Clone ID: 64-LIB2809-001-Q1-E1-H12
acctcacatagggaataacctttgtcttaggttgaatccatggcttcatagctttctgatgctgataaacagtcttgagatactggggcaaggcgaatttctggtaacgctggctgatttttttcagaaaatttaggcgattcttttcttcttcagtcagtttagttttcttagtgaatacttctgttgattccatgtcaacggtcttctttgaattttcctcactggtggagagctgctctctgttcagagtgggagtaatgggaacagcatttctcttaacctgatcccatgggttcaaaacaattggaccttgatacagatactggagatactgggggaacttctgataaaactgattgaattcattcagtgctttctggtantgcttatcgttcacagtaatcttaaactcctctgtggcaacttcagcag

SEQ ID NO: 14929 - DNA, 456 bp, Bos taurus
  Clone ID: 64-LIB2809-006-Q1-E1-H12
atggccgccggaaacagaacaataacagcacagaatatggactcttccagataaataataaaatttggtgcaaagacgaccagaaccctcactcaagcaacatctgtaacatctcctgtgacaagttcctggatgatgatcttactgatgacattatgtgtgtcaagaagattctggataaagtaggaattaactactggttggcccataaagcactctgttctgagaagctggatcagtggctctgtgagaagttgtgaacacctgctgtctttgctgcttctgtcctctttctgttcctggaactcctctgccccgtggctacctcgttttgcttctttgtacccccttgaagctaactcgtctctgagccctgggccctgtagtgacaatggacatgtaaggactaatctccaggggtgcatgaatggcgctctggacttttgacccttgctc

SEQ ID NO: 14930 - DNA, 339 bp, Bos taurus
  Clone ID: 64-LIB2809-009-Q1-E1-H8
gggctgggtttcacgcagtgatgaatctattagacgcatcaataagaaaattgatgaagtttcagagtgaggaacagcagcaaacagaggatgaactccaggataaaatccacccctttgcccagacacagtctctagtctatcccttccctgggcccatccctaacagcctcccacaaaacatccctcctcttactcaaacccctgtggtggtgccgcctttccttcagcctgaagtaatgggagtctccaaagtgaaggaggctatggctcctaagcacaaagaaatgcccttccctagagatccagttgagctctttactgggagccagagccgga

SEQ ID NO: 14931 - DNA, 262 bp, Bos taurus; identical to SEQ ID NO: 14709
  Clone ID: 64-LIB2809-011-Q1-E1-H8

SEQ ID NO: 14932 - DNA, 367 bp, Bos taurus
  Clone ID: 64-LIB2809-012-Q1-E1-H12
gggataaaacataaatgcctgaatgggcatatctctctggggatagggcactgctttctggggaacaagcaagactttggactgacaaagggacagcactgactgaggaggaaacatgacagttggacgaacaggctggcgaggctggtgcatccaagactggagcaaacgcataggaaggtgcagattttcaacatcagtgagactcgggctctggctttcagtaaagggctcaactggatatttagggaagggcatttcgttgtgcttaggagccatagcctccttcactttggacaccataaaggcctgaatgggcatatctctctggggatacggcactgctttctggggaacatgcaggact

SEQ ID NO: 14933 - DNA, 329 bp, Bos taurus
  Clone ID: 64-LIB2809-012-Q1-E1-H8
actgaataaactgggcaaggactcgaaagataagtgtggtaaactggaccccacctacaccagcgccactttactctttcagaaagaccctccagccaacatccagctcttccaagaggtgcccaatggtcagtccaaggaggacacactgggccggcccctgccccacctggccggcggcatgcaagcctccggggaggccgtatactgtgaggaaatccctcgctaggagaatgagctgttcctccggctggtcaccagcagccgggcccacgccaagatcaagtccattgatgtttcagaggctctgttcattgcccagaactgga

SEQ ID NO: 14934 - DNA, 402 bp, Bos taurus
  Clone ID: 64-LIB2809-013-Q1-E1-H8
gatacagcagaaaggcctgaatgggcatatctctctggggatagggcactgctttctggggaacaggcaggactttggactgagaaagggacagcacggactgaggaggaaacatgacagttggaggaagaggctggtgaggctggtgcatccaagactggagcagaggcagaggaaggtgcagattttcaacatcagtgagagtcaggctctggctttcagtaaagggctcaactggatatttagggaagggcatttctttgtgcttaggagccatagcctccttcactttggagactcccattacttcaggctgaaggaaaggcggcaccaccacaggggtttgagtaagaggagggatgttttgtgggaggctgttatggatgggcccagggaagggat

SEQ ID NO: 14935 - DNA, 331 bp, Bos taurus
  Clone ID: 64-LIB2809-014-Q1-E1-H12
gataaaagacaatgacagcacagaatatggactcttccagataaataataaaatttggtgcaaagacgaccagaaccctcactcaagcaacatctgtaacatctcctgtgacaagttcctggatgatgatcttactgatgacattatgtgtgtcaagaagattctggataaagtacgaattaactactgggtggcccataaagcactctgttctgaaaagctggattagtgactctgtgagaagttgtgaacacctgctgtccttggcggttccgtcccctttctgttcctggaaatcctctggcccgtggctaactcgttttgcctcctt

SEQ ID NO: 14936 - DNA, 407 bp, Bos taurus
  unsure (398): unsure at all n locations; Clone ID: 64-LIB2809-014-Q1-E1-H8
gatacaacagaaaggcctgaatgggcatatctctctggggatagggcactgctttctggggaacaggcaggactttggactgagaaagggacagcacggactgaggaggaaacatgacagttggaggaagaggctggtgaggctggtgcatccaagactggagcagaggcagaggaaggtgcagattttcaacatcagtgagagtcaggctctggctttcagtaaagggctcaactggatatttagggaagggcatttctttgtgcttaggagccatagcctccttcactttggagactcccattacttcaggctgaaggaaaggcggcaccaccacaggggtttgagtaagaggagggatgttttgtgggaagctgttatggatgggcccaaggaanggatagact

SEQ ID NO: 14937 - DNA, 327 bp, Bos taurus
  Clone ID: 64-LIB2809-016-Q1-E1-H8
gggatactgagcaggattaccatggcaacaacacatcatcagtagggtaaaactaacctgtctcacgacggtctaaccccagctcacgttccctattagtgggtgaacaatccaacgcttggtgaattctgcttcacaatgataggaagagccgacatcgaaggatcaaaaagcgacgtcgctatgaacgcttggccgccacaagccagttatccctgtggtaacttttcttttttttttttttttttttttttttaatttttttttttttttttttttttttttttttttttttttttttgccttaaaatgtaatttattgaaaag

SEQ ID NO: 14938 - DNA, 431 bp, Bos taurus
  Clone ID: 64-LIB2809-017-Q1-E1-H8
gccatgggcgcgggatacctggtgagattgtggaaagcctttcaagcagtgaggaatctattacacgcatcaataagaaaattgagaagtttcagagtgaggaacagcagcaaacagaggatgaactccaggataaaatccacccctttgcccagacacagtctctagtctatcccttccctgggcccatccctaacagcctcccacaaaacatccctcctcttactcaaacccctgtggtggtgccgcctttccttcagcctgaggtaatgggagtctccaaagtgaaggaggctatggctcctaagcacaaagaaatgcccttccctaaatatccagttgagccctttactgaaagccagagcctgactctcactgatgttgaaaatctgcaacttcctctgcctctgctccagtcttgggatgcacag

SEQ ID NO: 14939 - DNA, 443 bp, Bos taurus
  Clone ID: 64-LIB2809-018-Q1-E1-H8
ccatgggcccgggatactttgtaatttttcagtctgagaagctgttccagataacccaggtaacgctcagagggcacatcttccttttgaatgtgcttctgctcaacactattgggaacaatttcctcacttgacgaaatgctttcagcttccatttgcttaatatcttccatggcttgatcctcagttgattcactcccaatatccttgctcagttcattgaccttctcctttccaaacacttctggaaaaggtgccacaaaaaacctgagtaaattttcattgaggacttcttgagggagtccttggtgcttgataggatgtttaggcctggcaagagcaacagccacaagacaggtaaggatgagaagtctcatggttgtcaagatcttgaacccacgaatactaaaccataaactgttaagtttactaagatttaattg

SEQ ID NO: 14940 - DNA, 371 bp, Bos taurus
  Clone ID: 64-LIB2809-020-Q1-E1-H8
ggaaagcctttcagccattgaggaatcaattacacgcatcaataggaaaattgagaagtttcagagtgaggaacagcagcaaacagaggatgaactccaggataaaatccacccctttgcccagacacagtctctagtctatcccttccctgggcccatccataacagcctcccacaaaacatccctcctcttactcaaacccctgtggtggtgccgcctttccttcagcctgaagtaatggaagtctccaaagtgaaggaggctatggctcctaagcacaaagaaatgcccttccctaaatatccagttgagccgtttactgaaagccagagcctgactctcactgatgtttaaaatctgcaccttcctc

SEQ ID NO: 14941 - DNA, 449 bp, Bos taurus
  Clone ID: 64-LIB2809-021-Q1-E1-H8
cgccatggccccaggatacattggaggccaagaccacttctacctggagactcactgcaccattgctatcccgaaaggcgaggaaggggagatggagctctttgtgtccacacagaatgccatgaaaacccagtcctttgttgcaaaaatgttgggggttccagtaaaccggattttggtccgagtgaagagaatgggaggaggctttggagggaaggagacccggagcaccctggtgtctgtggctgtggccctggctgtatacaagactggacacccggtgcgctgcatgctggatcgtaatgaggatatgctgataactggcggcagacaccccttcttggccagatacaaggttggcttcatgaagacagggacgattgtggctctagaggtggatcactacagcaatgccgggaacagccgggacctctctcacagtataatgg

SEQ ID NO: 14942 - DNA, 401 bp, Bos taurus
  Clone ID: 64-LIB2809-022-Q1-E1-H8
ggataaaactgaagtgactaatcactgcacagaaagcaaatctgttttcaattttcttagcaattctgatataatattcactgtaatcaaaactgcctcagttcagttcagttcagtcactcagtcatgtccaactctttgtgaccccctggaccgcaacacaccatgactccctgtccatgaccaacacccgaagcttgctcaagctcatgtccattcagtgatgccatccaaccatctcatcctctgtcctcttctcctctcctgccttcaatctttcccagaatcagatcttttccaatgcatcagttcttcaaatcaggtggccaaagtattggagtttcagcaaaagtctttccagtgaatattcacgactgatttcctttatgattgactgaata

SEQ ID NO: 14943 - DNA, 400 bp, Bos taurus
  Clone ID: 64-LIB2809-023-Q1-E1-H12
ggcccgggatacaaagggactcccacgtggatggtccctgggttttccaggacaaaatattgtccaaagaggggtgattttccgtataactttcgttcagaagggtcacacaggcggtaactcttcagggtctccagtggctccttcctgctcatgacgccggtgtccgggtccactgtggttaaaatgcacctggagcaagccatcacccttttcagttccacatcaccaataagaagctcattccatgagtcctctgcatagacaccacagcctgaaattacgatattgggcctgaagttggctattttaactttcttctctagcctggagttgagatctgccaatgatgcctcagaaaggatcaagaaagggctggcatctgagtatgggatctggt

SEQ ID NO: 14944 - DNA, 157 bp, Bos taurus
  Clone ID: 64-LIB2809-025-Q1-E1-H8
gggcgcgggatacatgttgcattaaaagcgccatcagggacatcgagcaagggtcaaaagtccagagcgccattcatgcacccctggagattaatccttacatgtccattgtcactacagggcccagggctcagatatgagttagcttcaacggggt

SEQ ID NO: 14945 - DNA, 396 bp, Bos taurus
  Clone ID: 64-LIB2809-026-Q1-E1-H12
tctgtaatgcttcatgcgtccagcatggagttacattggctcatactgactcttacgatccagacggcagacacggagaggataatggccatcttcagctctctgcaggcgttgtggaaggtggcagctatcaggcagcactgggtgatacggtatttgagctgggaaatggagaagcaaaagcgttcactggtctctcaccaacagctccctctttcaactgtgaattaagagatgcgtttggagaggtagattcagcacctttagtggaaaggtctactgataatactgagtttgtcagtcagaacaaccaggaatttcagacgtcctcttctgaagatgaagtggttagaaagaaacaacaagataatactagccaggagagacaaagagaaa

SEQ ID NO: 14946 - DNA, 399 bp, Bos taurus
  Clone ID: 64-LIB2809-027-Q1-E1-H8
ttttcagtctgagaagctgttccagataacccaggtaacgctcagagggcacatcttccttttgaatgtgccttctgctcaacactattgggaacaatttcctcacttgacgaaatgctttcagcttccatttgcttaatatcttccatggcttgatcctcagttgattcactcacaatatccttgctcagttcattgaccttctcctttccaaacacttctggaaaaggtgccacaaaagacctgagtaaattttcattgaggacttcttgagggagtccttggtgcttgatacgatgtttaggcctggcaagagcaacagccacaagacaggtaaggatgagaagtttcatggttgtcaagatcttgaacccaagactgggaacgaaaggccaactg

SEQ ID NO: 14947 - DNA, 414 bp, Bos taurus
  Clone ID: 64-LIB2809-028-Q1-E1-H8
cctgaatgggcatatctctctggggatagggcactgctttctggggaacaggcaggactttggactgagaaagggacagcacggactgaggaggaaacatgacagttggaggaagaggctggtgaggctggtgcatccaagactggagcagaggcagatgaaggtgcagattttcaacatcagtgagagtcaggctctggctttcagtaaagggctcaactggatatttagggaagggcatttctttgtgcttaggagccatagcctccttcactttggagactcccattacttcaggctgaaggaaaggcggcaccaccacaggggtttgagtaagaggagggatgttttgtgggaagctgttatggatgggcccaaggaagggatagactagagactgtgtctgggcaaagg

SEQ ID NO: 14948 - DNA, 251 bp, Bos taurus
  Clone ID: 64-LIB2809-030-Q1-E1-H8
gggatactccttagccatggcggccagcgacatctccctgctggacgcccagagtgcccccctgagagtgtatgtggaggagctgaagcccacccctgagggcgacctggagatcctgctgcagaaatgggagaacggtgagtgtgctcagaagaagatcattgcagaaaaaaccaagatccctgcggtgttcaagatcgatgccttgaatgagaacaaagtccttgtgctggacaccgactacaaaaagt

SEQ ID NO: 14949 - DNA, 345 bp, Bos taurus
  Clone ID: 64-LIB2809-031-Q1-E1-H8
ccatgggcccgggatacaaaacaatgacagcacagaatatggactcttccagataaataataaaatttggtgcaaagacgaccagaaccctcactcaagcaacatctgtaacatctcctgtgacaagttcctggatgatgatcttactgatgacattatgtgtgtcaagaagattctggataaagtaggaattaactactggttggcccataaagcactctgttctgagaagctggatcagtggctctgtgagaagttgtgaacacctgctgtctttgctgcttctgtcctctttctgttcctggaactcctctgccccgtggctacctcgttttgcttctttgt

SEQ ID NO: 14950 - DNA, 356 bp, Bos taurus
  Clone ID: 64-LIB2809-032-Q1-E1-H8
cgtatgtgtatgatacataaggttatgtattaattgtagccgcgttctaacgacaatatgtacaagcctaattgtgtagcatctggcttactgaagcagaccctatcatctctctcgtaaactgccgtcagagtcggtttggttggacgaaccttctgagtttctggtaacgccgtcccgcacccggaaatggtcagcgaaccaatcagcaaggtcatcgctagccagattctctacgccggacgcatcgtggccggcatcaccggcgccacaagtgcggttgctggcgcctatatcgccgacatcaccgatggggaagatcgggctcgccacttcgggctcatgagcgcttgttt

SEQ ID NO: 14951 - DNA, 375 bp, Bos taurus
  unsure (313)...(314): unsure at all n locations; Clone ID: 64-LIB3057-001-Q1-K1-H12
gagcttcctggtgaagtgtgtttcttgaaatcatcaccaccatggacagcaaaggttcgtcgcagaaagggtcccgcctgctcctgctgctggtggtgtcaaatctactcttgtgccagggtgtggtctccacccccgtctgtcccaatgggcctggcaactgccaggtatcccttcgagacctgtttgaccgggcagtcatggtgtcccactacatccatgacctctcctcggaaatgttcaacgaatttgataaacggtatgcccagggcaaagggttcattaccatggccctcaacagctgccatacctnnctcctttctacccctgaagataaagaacaagcccaacagacccaccatgaaggtcctatga

SEQ ID NO: 14952 - DNA, 326 bp, Bos taurus
  Clone ID: 64-LIB3057-001-Q1-K1-H8
gcaagatggcggcggcagcttctcatggcgggagagccggtggtggcggaggcagtagtggggctggcggtggctccggctgtgggacaggcagtagccgtagcggtttactggacaagtggaagattgacgataagcctgtaaaaattgacaaatgggatggatcagctgtgaaaaattctttggatgattctgccaaaaaggtacttctggaaaagtacaagtatgtggagaattttggtctaattgatggccgcctcatcatctgtaccattctctgtttcttcgccatcgtggctttgatttgggattatatgcatcccttt

SEQ ID NO: 14953 - DNA, 261 bp, Bos taurus
  Clone ID: 64-LIB3057-003-Q1-K1-H12
tgccgactttagagatcacttcccccaactcggcacacgccgtggcactggctcctttcacgcccaggaagcatcgcctggcggagcaacagccgctcctgcggcaaccgacgccccctggcccgggaccgcagcctgggcccagcgcggacatgcagcgcagctacgacagctactactaccccgcaacacggccgggaccgaggcgaggggcctgcacgctgagcggcagcctgagaagcctgcacgccagccccttcc

SEQ ID NO: 14954 - DNA, 446 bp, Bos taurus
  Clone ID: 64-LIB3057-005-Q1-K1-H8
cacgcgtccgtgtagatcgagagcgaccggacttaaagtgtctttatagactctgaacatcctacaccgggtgcgattatttaagatgaaggccattacatcctatcataccctttaactgtctggaacatacacatactgttcagcaaacggactcatcaccatccttcttaccatagctacttcatgcctgcatgcataatcagttttggtgcctgaagagcatgccattctaaagacctaaccacgtaaagtaacctgctcgcgtgcatccacgcctgcaagcccaaactgttcgccgacactccagagtatccctgcaaccgtgatcatcaatccctcactgtaaaccctctaaagtacgtcatggaccatttccactggcaccgcttttaccatcggaatgctagcaacaccatcgcagttccgatcgcaatccacatgca

SEQ ID NO: 14955 - DNA, 382 bp, Bos taurus
  Clone ID: 64-LIB3057-007-Q1-K1-H8
ctgactttcaatagatcgcagcgagggagctgctctgctacgtacgaaaccgcgagccagaagcaggtcgtctacgaatggtttagcaccaggcgccccacgaacgtgcggtgcgtgacgggcgagggggcggccgcctttccggccgcgccccgtgtcccgggacgaagggctctccgcaccggaccccggtcccgacgcgcggcgggggcgcgccgcgccgcgccccgggggacgcgggcgacggcccgccggcggtgacggcgggggaccggctatccgaggccaaccgaggctcccgcggcgctgccgtatcgttccgcctgggcgggattctgacttagaggcgttcagtcataatcccacagatggtagcttcgcc

SEQ ID NO: 14956 - DNA, 379 bp, Bos taurus
  Clone ID: 64-LIB3057-008-Q1-K1-H8
attatagcatgtttgcttaatttacagcaagcagaaaataagctgggtcttgttttgatccaaacattgatgttttaaaggttgtacacaatatttgttaaaaagaacatataaaaatacctttttagaagcttctataagaaagaaaatacaaagtttaaccccacaactttcctctttgctagaactgcgaactactgctacagttttaaatagactttttgtttaaactatacatccaggaaaatctaaaaaaattaaagaaacgtgcatacaaagtgacttgatatgtccagtctcatttcagagtaaaagctagcatctttaaaattttagattgcttgcttacaggcataagtaagaaatgttgtggggaaac

SEQ ID NO: 14957 - DNA, 401 bp, Bos taurus
  Clone ID: 64-LIB3057-009-Q1-K1-H12
tccggtgttaactcctcacgaccaacgaacgttcagggcctgaccatcgagtgtacagggggcttatcacgctggcgctgtgtaatctactgtagggcctatgtgtactctaccaccctcgtatgtcgcaatcggcctgccacctgccaggtatccgttcaagacctgctagagcgtgcagtcatggtgtcccactacacgcatgacctctcctttgaaatgctcaacgaattcgatcaacggtatgcccagtgcaaagggttcattaccatgggcctcaacagctgccatacctacttccttgctacccctgaagatttagaacaagcccaacagacccaccatgaaaaccttatgagcttcgatcttgagttgctgcgctcctggaatgaccctctcta

SEQ ID NO: 14958 - DNA, 394 bp, Bos taurus
  unsure (369): unsure at all n locations; Clone ID: 64-LIB3057-009-Q1-K1-H8
acgaagggaagaaaagtgaccgagaggccgctgaacatcctcgccccggcgcagcgggagccgcccgaggcagcttccccgtgacagagcctcagcctgcctggaagatgccgagactgtgcagcagtcgttcgggcgccctgctgctggccttgctgcttcaggcctccatggaagtgcgtggttggtgcctggagagcagccagtgtcaggacctcaccacggaaagtaacctgctggcgtgcatccgggcctgcaagcccgacctctccgccgagacgccggtgttccccggcaacggcgatgagcagccgctgactgagaaccctcggaagtacgtcatgggccatttccgctgggaccgcttcngccgtcggaatggtagcagcagcag

SEQ ID NO: 14959 - DNA, 455 bp, Bos taurus
  unsure (12): unsure at all n locations; Clone ID: 64-LIB3057-011-Q1-K1-H12
tcccggtcgacnacgcgtccgggagagtcagtctggcgcgtgcccacctggcccggaaggccagcggagtctgccgggggcacgagcatcagcccttgggcccgaggcctgccgccccgggagccccgggcagcgcggtggagctgctgggcaagtcctaccctcaggacgactacagcaacctgacccgcaaggtcctgtccaaggtgggccggaacctgcacaaccagccgcagcacccgctctggctgctcaaggagcgcgtgaagcagcacttctacgcgcagtacccgggccgcgcggggaccccgctcttctccgtgtacgacgacctgtccccggtggtcaccacctggcagaacttcgacagcctgctcatcccggccgaccaccccagccggaagaagggcgacaactacttcctgaacgccacgcacatgctgcgcgcgcacacg

SEQ ID NO: 14960 - DNA, 419 bp, Bos taurus
  Clone ID: 64-LIB3057-012-Q1-K1-H8
gcggccaaatgcctcccaatttaattagtgactcgcatgaatggatgaacgagattcccagtgtccctacctactatccagcgaaaccacagccaagggaacgggcttggcggaatcagcggggaaagaagaccctgttgagcttgactctagtctggcacggtgaagagacatgagaggtgtagaataagtgggaggcccccggcgcccccccgtttcccgcgagggggcggggcggggtccgccggccttgcgggccgccggtgaaataccactactctgatcgttttttcactgacccggtgaggcggatgggcgagccccgaagggctctcgcttctggcgccaaagcgcccgccgcgcgccggccggtcgcgacccgctcggggacagtgccatgtggggaagttgaccggggc

SEQ ID NO: 14961 - DNA, 365 bp, Bos taurus
  Clone ID: 64-LIB3057-013-Q1-K1-H12
gcgttcgcgcgagcggccgccctttttttttttttttttttctcattaaactttttttaatgggtctcaaattctgtgacagatttttggtcaagttgttttcattaaaaagtactgattttaaaaactaataacttaaactgccacacacaaaacatatggtccacaaaaacattctcctttccttctgaaggttttacgatgcattgttatcattaaccagtcttttactattaaacttaaatggccaattgagacaaacagttctgagaccgttcttccaccactgattaagactggggtggcaggtattggggataatattcatttagccttctgagctttctgggcagaactggtgacct

SEQ ID NO: 14962 - DNA, 319 bp, Bos taurus
  Clone ID: 64-LIB3057-013-Q1-K1-H8
gcgggcggcctttggtttttttttttttttttttttttttatcgtcagagcgcacaagctttattcagcaataacggcagtatttatgagtatgagctgtacaacggtggggatgctgtcttcagcacagagtctgagagcaaacaattatggtgacagagctcggcctccgcggccctgctccctccccagacaggcccaggttgctccccactcctgcacggtggatggggtcccgaccatgggctccctctgtacccacactctctgcacctgacctgccttcccaggccactgggccaaagggagaggggtggac

SEQ ID NO: 14963 - DNA, 388 bp, Bos taurus
  Clone ID: 64-LIB3057-014-Q1-K1-H8
cgaatggtttagcaccaggcgccccacgaacgtgcggtgcgtgacgggcgagggggcggccgcctttccgcctgggcgggattctgacttagaggcgttcagtcataatcccacagatggtagcttcgccccattggctcctcagccaagcacatacaccaaatgtctgaacctgcggttcctctcgtactgagcaggattaccatggcaacaacacatcatcagtagggtaaaactaacctgtctcacgacggtctaaacccagctcacgttccctattagtgggtgaacaatccaacgcttggtgaattctgcttcacaatgataggaagagccgacatcgaaggatcaaaaagcgacgtcgctatgaacgcctggccggcacaag

SEQ ID NO: 14964 - DNA, 235 bp, Bos taurus
  Clone ID: 64-LIB3057-017-Q1-K1-H8
gaaagacggatttggacacgaaactgccatacagacgaatagggccagtaagtaccttggcagcgtaagagatggacagactgtggagtatgatggcgaaccaggagaagggcctgcgtaggcagcaagtgatgcacactctgatggagggccaatacacggcaggaaagacgcacatgacgtacacactgacacacgctgaacacgtgacaaccattctcactacaggcaccaa

SEQ ID NO: 14965 - DNA, 312 bp, Bos taurus
  Clone ID: 64-LIB3057-018-Q1-K1-H8
ggtatgcccagggcaaagggttcattaccatggccctcaacagctgccataccttgtcccgtcctacccctgaagataaagaacaagcccaacagacccaccatgaagtccttatgagcttgattcttgggttgctgcgctcctggaatgaccctctctatcacctagtcaccgaggtgcggggtatgaaaggagccccagatgctatcctatcgagggccatagagattgaggaagaaaacaaactacttctggaaggcatggagatgatatttggccaggttattcctggagccaaagagactgagccct

SEQ ID NO: 14966 - DNA, 315 bp, Bos taurus
  unsure (261): unsure at all n locations; Clone ID: 64-LIB3057-019-Q1-K1-H12
gatcaagaggcatcctcttgtggtttattatcccaaagaccctaaggtggttggcgcacgccccaccgcctacattgacttcgcccggcagaagctagatcccaagattgccgtggctgcgcagaactgttacaaagtggccaatggggcctttacgggggagatcagccctggcatgatcaaagatcttggagccacgtgggtagtcctggggcactccgagagaaggcatgtctttggggagtcagatgagctgattgngcagaaagtggcccatgccctggcaaagggacttggagtgattgcctgcattgg

SEQ ID NO: 14967 - DNA, 311 bp, Bos taurus
  unsure (51),(100),(106),(118),(121),(193)...(194),(203),(206),(211),(214),(225): unsure at all n locations; Clone ID: 64-LIB3057-019-Q1-K1-H8
cggacgcgaggggagggggcggcagcggcggcggcggcggcggcggcggcncggcaggcgggaacaggcaacaggggccagccgccgccaagaaccagcnggaggngaacaaccgcancancgaggagacgctcgcgctcaagggcgagaacgcggccgccggaaacaaaccagaagctggagaaggaacagnngcagaaggnganggagnccnctatcatatgncaaatcctaatggagataaaacaaaagtgatggtcagtatttctttgaaagtctacaaggaacttcaggcacatggttgctgatga

SEQ ID NO: 14968 - DNA, 421 bp, Bos taurus
  Clone ID: 64-LIB3057-020-Q1-K1-H12
cccgactcctggagagagcagctaaaatgaacgatgcttttggtggtggctccttgactgcgtctaccagtcatcgaaacacaagctggtgatgtgtctgcttacattccaacaaatgtcatttccatcactgacggacagatcttcttggaaacagaattgttctacaaaggtatccgccctgccattaatgttggtttgtctgtgtcccgtgtcggatctgctgcccaaaccagggccatgaaacaggtggcaggtactatgaaactggagttggctcagtatcgtgaggttgctgcttttgcccagttcggttctgaccttgatgctgccactcaacaactcttgagtcgtggtgtgcgtttgactgagctgctcaagcagggacagtattctcccatggctattgaagagcaagtgg

SEQ ID NO: 14969 - DNA, 433 bp, Bos taurus
  Clone ID: 64-LIB3057-020-Q1-K1-H8
ggcgccccacgaacgtgcggtgcgtgactggcgagggggcggtcgcctttgcggcctgaccccgtgtcccgggacgaaaggctctccgcaccggaccccggtcccgacgcgcggcggcggcgcgccgcgccgcgccccggaggacgcgggcgacggcccgccggcggggacggcgggggaccggctatccgaggccaaccgaggctcccgcggcgctgacgtatcgttccgcctgggcgggattctgacttagaggcgttcagtcataatcccacagatggtagcttcgccccattggctcctcagccaagcacatacaccatatgtctgaacctgcggttcctctcgtactgagcaggattaccatggcaacaacacatcatcagtagggtaaaactaacctgtctcacgacggtctaaacccagctcacgt

SEQ ID NO: 14970 - DNA, 443 bp, Bos taurus
  Clone ID: 64-LIB3057-022-Q1-K1-H8
gggggcggaaatgtacagattgtcaccaagaagatagacctaagccatgtgacatccaaatgtggctctctgaagaacatccgccacaggccaggtggtgggcgtgtgaaaattgaaagtgtgaagctagatttcaaagaaaaggcccaagctaaagtcggttcgcttgacaatgctcaccacgttcccggaggtggtaatgtcaagattgacagccaaaagttgaacttcagagagcatgctaaggcccgtgtggaccatggtgctgagatcattacacagtccccaggcagatccagcgtggcttccccccgacgactcagcaacgtctcctcttctggaagcatcaacctgcttgaatccccccagcttgccaccctggccgaggatgtcactgccgcactcgctaaacagggcttgtgaatatctctcatttagtattg

SEQ ID NO: 14971 - DNA, 264 bp, Bos taurus
  Clone ID: 64-LIB3057-023-Q1-K1-H8
cgaagggaagaaaagtgaccgagaggcctctgaacatcctcgccctggcgcggcttgagccgcccgaggcagcttcctcgtgacagagcctcagcctgcctggaagatgccgagactgtgcagcagtcgttcgggcgccctgctgctggccttgctgcttcaggcctacatggaagtgcgtggttggtgcctggatagcagccagtgtcaggacctcaccacggatagtaacctgctggcgtgcattcggtcctgcaagcccga

SEQ ID NO: 14972 - DNA, 415 bp, Bos taurus
  unsure (329),(378): unsure at all n locations; Clone ID: 64-LIB3057-025-Q1-K1-H8
cgcgcccccacggctccccgcttcctatggacgggggagttgcctgttacgttgcagctgccgggaagtccactcaacgtctagcgcccacccgggcgggtcccgcaagtatataaagacggcggagagcgagtgggacaagacggcgcgacggaagagaacgaagggaagaaaagtgaccgagaggccgctgaacatcctcgccccggcgcagcgggagccgcccgaggcagcttccccgtgacagagcctcagcctgcctggaagatgccgagactgtgcagcagtcgttcgggcgccctgctgctggccttgctgcttcaggcctncatggaagtgcgtggttggtgcctggagagcagccagtgtcaggacctnaccacggaaagtaacctgctggcgtgcatccgggcct

SEQ ID NO: 14973 - DNA, 424 bp, Bos taurus
  Clone ID: 64-LIB3058-001-Q1-K1-H12
ggggtctcctcctcctgctataatgtgatccctaggctttattttcttatttacagtagggggtttaactggaattgtcttagccaactcttccctcgatattgttcttcacgacacatactacgttgtcgcacatttccactatgttttatcaataggagctgtatttgctattatagggggatctgttcattgatttccactattctcaggttatactctcaacgatacatgagccaaaatccacttcgcaattatatttgtaggcgtcaatataaccttcttcccacaacactttctaggactatctggcatgcctcgacgatactccgactacccagatgcatacacaatatgaaatactatctcatcaataggctcattcatttccctaacagcagttatactaatagttttcatcatc

SEQ ID NO: 14974 - DNA, 443 bp, Bos taurus
  unsure (54): unsure at all n locations; Clone ID: 64-LIB3058-002-Q1-K1-H8
cccacgcgtccgcccacgcgtccgcggacgcgtgggcagcggcgcctcggcctncggttgcacagcgtctgcctgcctgcgcggccctgtgaccgtgaggcgacacgacgccgagagatcacccgccccccgcatcgtgtccgccccgcttgggattgtgaggtaaagcgtgatggcagcgccgccggcgagggctcgagccgactacgactacctaatcaaactgctcctcatcggagacagcggcgttggaaaaagttgcctcctgttacggttttcagatggatcattcaccactagcttcattaccactattggcattgacttcaagataagaactgttgagttggatggcaaaaggattaagttgcagatctgggatactgcaggccaagaacgtttccgcacaattaccactgcctactacaggggagcaatgggca

SEQ ID NO: 14975 - DNA, 416 bp, Bos taurus
  Clone ID: 64-LIB3058-003-Q1-K1-H12
tctagatcgcgagcggccgcccttttttttttttttttttaggattaacatgatttatttcattatcagtcttacaagttgctgaggttgggcaaagccaggagagtaacttcaggcgtttctatcaagtgacagcctgattagcagggccgttactgagcggagggcagtggagggcaccccaggaaccccagctcctacagcagtgttaaaacccctccttcagaggcactggatagggcgtggcccgtgacagccaggggccactccactggcttttggtgcccactgacccctttcagcagagacacaaaggcctccagaggcaccaaggaggcaggatgggctgggcaggtggaaagactggtactttctcaccgaggctctgtctctggcctcgatcttcccaccgacac

SEQ ID NO: 14976 - DNA, 452 bp, Bos taurus
  Clone ID: 64-LIB3058-004-Q1-K1-H8
tctacgtacaaattctttgaggttatcctcattgatccattccataaagctatcagaagaaaccctgacacccaatggatcaccaaaccagtgcataagcacagggagatgcgggggctgacgtctgcaggcagaaagagccgcggcctgggcaagggtcacaagttccaccacactattggtggctctcgccgcgcagcgtggagaaggcgcaatactctccagctccaccgctaccgctaacacgtgatgtttgtaaagtccttacctaataaacaatttaggacgttcctgtctgcttaaaagtgtttttaatttgtctgttaaagctagtctgcagattgcttcattgaatgcattgtcaaattatgaaagttaaagtgcaataatgtttgaagacttattgaagttacttacacatataagtgtatatgaagtgatggtgtatcttg

SEQ ID NO: 14977 - DNA, 213 bp, Bos taurus
  Clone ID: 64-LIB3058-005-Q1-K1-H8
actgtgtggaagttcctgaataaagaacctgcggggctgaacaacgcgttcatgcttgctgacgcaagcaagacttttttgatgaaccacagcttgccagcctatgtctggagaacattgacaagaacacggctgatgccatcacagctgagggcttcacggacatcgacctagacacactggtggcggtgctggaacgtgacacgctgggca

SEQ ID NO: 14978 - DNA, 435 bp, Bos taurus
  Clone ID: 64-LIB3058-006-Q1-K1-H8
caattttaggagccatcaacttcattacaacaattatcaacataaagccccccgcaatgtcacaataccaaacccctctgttcgtatgatccgtaataattaccgccgtactactactactctcgctccctgtattagcagccggcatcacaatgctattaacagaccggaacctaaatacaaccttcttcgacccggcaggaggaggagaccctattctatatcaacacttattctgattctttggacaccccgaagtctatattttaatcttacctgggtttggaataatctctcatatcgtgacctactactcaggaaaaaaagaaccattcggatatatgggaatagtttgggctataatgtcaatcggatttctaggtttcatcgtatgagcccaccatatattcactggtcgaatagacgtcgacacac

SEQ ID NO: 14979 - DNA, 423 bp, Bos taurus
  Clone ID: 64-LIB3058-007-Q1-K1-H8
tcggtgacagggagccttgacgtactccttttcctatttggaaccagtctgttgttccatgtccggttctaactgttgcttcctgacctgcatataggtttttcaagaagcaggtcaagtggtctggtattcccatctctttcagaattttccacagttttattgtgatccacacagtcaaagactttggcaaagtcagtaaagcagaaatagatgtttttctggaactctcttgttttttccatgatccagcggatgttggcaatttgatctctggttcctctgccttttgtaaaatcagcttgaacatctggaagttcacagttcacgtattgctgaagcttggcttggagaattttgagcattactttactagcatgtgagatgagtgcaattgtgcggtagtttgagcattctttggca

SEQ ID NO: 14980 - DNA, 323 bp, Bos taurus
  Clone ID: 64-LIB3058-008-Q1-K1-H8
cgtgttttaagtattggtgatggtattgctcgggtacatgggctaagaaatgttcaagcagaagaaatggtagagttttcttcaggtttaaagggtatgtctttgaacttggagcctgacaatgttggtgttgtcgtgtttggaaatgataaacttattaaggaaggagatattgtgaagagaactggggctattgtagatgttccagtcggcgaggagctgctgggtcgtgtagttgatgcccttggtaatgccattgatggaaagggtccaattggttccaaggcccgaagacgagttggcttgaaagcccctgggatcat

SEQ ID NO: 14981 - DNA, 415 bp, Bos taurus
  Clone ID: 64-LIB3058-009-Q1-K1-H8
ggccgtgcacctgggtcttcgggctgcggcgcgcgggcgccgcggcttcacctccaaggcggatcctcagggaagtggccgggtcacgggcgagctgatccagcacctggagcggctatcgctggtggacttcggcagccaggaggccgtggcccggctggagaaagccatcgccttcgccgaccggctccgcgcggtgaacaccgacggagtggagcccatggaatcagtcctggaggacagatgtctgtacttgagatccgacaatgtggtagaaggcagctgtgctgaagaactactacaaaactcccaccgagttgtggaagagtattttggggctccgccaggtaatatctcttggtcaaagctggatgaaaaacagcccttctcacatcgctgaatatctattctggga

SEQ ID NO: 14982 - DNA, 380 bp, Bos taurus
  unsure (372): unsure at all n locations; Clone ID: 64-LIB3058-010-Q1-K1-H8
ccgagttctgccaccgcttcctggagggcaagattaagccccacctgatgagccaggagctgcctgacgactgggacaagcagcctgtcaaagtgctggttgggaagaactttgaagaggttgcttttgatgagaaaaagaacgtctttgtagagttctatgccccgtggtgcggtcactgcaagcagctggcccccatctgggataagctgggagagacgtacaaggaccacgagaacatagtcatcgccaagatggactccacggccaacgaggtggaggcggtgaaagtgcacagcttccccacgctcaagttcttccccgccagcgccgacaggacggtcatcgactacaatggggagcggacactgnatgggttt

SEQ ID NO: 14983 - DNA, 402 bp, Bos taurus
  Clone ID: 64-LIB3058-011-Q1-K1-H12
gtatggattgagatttaaatttcagggactccagtatgtaaataatattgaaaggcatgtgaatagttaaggtcatttagggagaaagtgtagagagagttttgtccaaacactttttgtcaaaagttttgtccaaaaaagagttttgtccaaaacacaaaagtgtagaaagttttatccaagccaaaactgaagaaaattagaggaaaatatgcaatttgtgtgtgtgtgtgttagttgctcagtcgtgtccaactctctgggacccaatggactgtaacccaccaggctcttctctccatgggattctccaagcaagaatactggaatgggtagccattcccttctccggggaccttcctgacccagggatggaatccaggtctcctgcactgcaagcca

SEQ ID NO: 14984 - DNA, 413 bp, Bos taurus
  unsure (369): unsure at all n locations; Clone ID: 64-LIB3058-011-Q1-K1-H8
aaaaattccattcttgtagtaacacagtaatggaattagcaatcaatcttaggctgctagatatttgtaataatgtacatatccaaatactcaaaattaaatttgtttgagacagggtatatttgcttagtatatttaatgctccttacaacacagttcagatattcacataaaagctcactatctctggtctcttttctttggaaaggcgttgaaaactaagtatttcagtaatcggccagggccaacacctggatgtcagctgccaagaccaaactgtccagcggaggctctaaaggagcagtccaatccagccatggcaacaaaacggaagagaacagaggccttggaacaaggtaaaactcattntcttacatgaattccgaaaactccagatacctaatgtacagcta

SEQ ID NO: 14985 - DNA, 253 bp, Bos taurus
  Clone ID: 64-LIB3058-012-Q1-K1-H8
ggggtgcgtgcctgctatgagcgctccaacgagtaccagctgattgactgcgcccagtacttcctggacaagaatgatgtcatcaagcaggatgactacgtgcccagcgaccaggatctgctccgctgccgtgtcctgacttctggaatctttgagaccaagttccaggtggacaaagtcaacttccacatgtttgacgtgggcggccagcgcgatgaacgccgcaaatggatccaatgcttcaatgatgtga

SEQ ID NO: 14986 - DNA, 393 bp, Bos taurus
  Clone ID: 64-LIB3058-013-Q1-K1-H8
cgcgtccgcgggacgcgtggggtgaccccatggacttcagcctaccaggctccttcatccatgggattttccaggcaagagtactgaagtggggtgccattgccttctccgtagttggactaagcacccttctaaagaaaatgactgcttgattattgctatctggcaaatataaatgatccaatccccttttattgactcaacagtcatcagtgtgaaatacatgacaagagcatgtatttgtgtgtatttctaaacccttatttcatctgctaagcctcatgttactgcaaactaaatactttggccattgactcataagtaactcattggaaaagactctgatgctgagaggggattggggacaggatgagaaagggacgacagaggatg

SEQ ID NO: 14987 - DNA, 420 bp, Bos taurus
  Clone ID: 64-LIB3058-017-Q1-K1-H12
gaaccactgctgtgggaactatttctccaggcagggccagtagtgaacacgcacatgcgaaaagatagagtcactggtcagcaccaaggctatggctttgtggaattcttgagtgaggaagatgctgactatgccattaagatcatgaacatgatcaaactctatgggaagccaatacgggtgaacaaggcatcagctcacaacaaaaacctggatgtgggggccaacatttttattgggaacctggacccagagattgatgagaagttgctttatgatacttttagcgcctttggggtcatcttacaaacccccaagattatgcgggaccctgacacaggcaactccaaagggtatgcctttaataaattttgcttcatttgatgcttcggatgcagcgattgaggccatgaatgggca

SEQ ID NO: 14988 - DNA, 466 bp, Bos taurus
  Clone ID: 64-LIB3058-019-Q1-K1-H8
cagccacgaaaaagaatgaaataatccatgcacttgcagcaacatggatacaactagagtgtatcatgctgagtgagtaactcagagagagaaagacagagactctatatcacttacacgtggaatctgaagttggacacagatgaacttacctgtgaaacagaaacagaactcctagacatagagagcagactgggggtttcaaggaggaggggtgggtggggagaagggactgggagtttggggttagcagatgaagctgtaatacatggaatggatgaacaacaaggtcctatcgtgtagcacgaatagctatgttcagtgttctttgataaaccataatggaaaagaacattaaaaaaaagggtgggcgttgtttggttcgttccagcttctctggtgtcttcggggagcccagcctctgcctggcagaggaaatgcacacaggtgtgcctgttcccaggcg

SEQ ID NO: 14989 - DNA, 327 bp, Bos taurus
  Clone ID: 64-LIB3058-020-Q1-K1-H8
tccatctcgggaaatgcccccatccttccgtgcaggagaatttcgacgtgaataagtatcttggaaaatggtatgaaattgagaagatcccagtgagctttgagaagggaagttgcatccaagccaactactcactaaaggaaaatggaaacgtcaaagtgataaacaaggagctgagagctgatggaactgtgaatcaaattgaaggtgaagccaccccggagaacatcacagagcctgccaagctggcagttaagtttttctggttcatgccgtcagctccgtactgggtcctggccaccgactatgagaactacgccctcgtgt

SEQ ID NO: 14990 - DNA, 411 bp, Bos taurus
  Clone ID: 64-LIB3058-021-Q1-K1-H8
cggacgcgtgggcttgactagagagtaaaatttaacactaccatagtaggcctaaaagcagccatcaattaagaaagcgttaaagctcaacaacaaaaattaaatagattccaacaacaaatgattaactcctagccccaatactggactaatctattatagaatagaagcaataatgttaatatgagtaacaagaaaaattttctccttgcataagtctaagtcagtgcctgataatactctgaccactaacagtcaataaaaataatccaacaataaacaatttattgattatactgttaacccaacacaggagtgcatctaaggaaagattaaaagaagtaaaaggaactcggcaaacacaaaccccggctgtttaccaaaaacatcaccttcagcaatcccagtatt

SEQ ID NO: 14991 - DNA, 421 bp, Bos taurus
  Clone ID: 64-LIB3058-024-Q1-K1-H8
gcctgaaatccgatcttacatggaagagttcccattcccattttacataattctccgcgacgtgaacgcacttcccgagacactcagcgatgctctcaggcagtggtttgagctggtgacggcctctgaccacgcatagagcaggaggaacacagtcccaaatgagacttttaactgcgctcagaatgtcacactgcttgccaggagctcccttctggagaactgtttctgaactcctagcttgaaaatggtattttatcttagacctgatttataaacattcacccaatagctacaaaaaattatcgcaacataagtttcggtttcagggcctttatgctccctgctgtgcctgggctccggttcttataacaaacctggggcagtgaaggaacagcagcaggagtctcatacctggggc

SEQ ID NO: 14992 - DNA, 203 bp, Bos taurus
  Clone ID: 64-LIB3058-026-Q1-K1-H12
ccctggtcgacccactcgtccggttctagatcgcgagcggccgcccttttttttttttttttttttttttttttttttttttttttttttttttttttttttttttttttttttttttttttttttttttttttttttttttttttttttttttttttttatctctttattttcttttttttactccattcttttcctttttt

SEQ ID NO: 14993 - DNA, 171 bp, Bos taurus
  Clone ID: 64-LIB3058-028-Q1-K1-H8
cctgtggaaccatcggagttgccaatggtctgcttcatgaagtacaccttgggacgggcttcttgtcccttgaggtgtgcaatttgctttttcctgcagatctcatgctgcgccgtgagcggacagagcaccatcaacacacaggcccactctggcacctaacccagacac

SEQ ID NO: 14994 - DNA, 459 bp, Bos taurus
  Clone ID: 64-LIB3058-029-Q1-K1-H8
gaaattttaaacttgtacagtattgccatgaaccatatattgacctaatggatatgggaagagcaacagtaactccacaagtgtcagagaatagttaacattcaaaaaaacttgttttcacacggaccaaaaagatgtgccatataaaaatacaaagcctgtcatcaacagccgtgaccactttagaatgaaccagttcattgcatgctgaagcgacattgttggtcaagaaaccagtttctggcatagcgctatttgtagttactttgctttctctgagagactgcagataagatgtaaacattaacacctcgtgaatacaatttaacttccatttagctatagctttactcagcatgactgtagataagaatagcagcaaacaatcattggagcttaatgaacatttttaaaaataagtaccaaggccttccctctacttgtgagttttaaaatcgt

SEQ ID NO: 14995 - DNA, 429 bp, Bos taurus
  Clone ID: 64-LIB3058-030-Q1-K1-H12
gcggaacaacaaatattttaataaaatctataaattcattagtaacattggatcagtgtgaatttcctagatctgatcattatactataactatgcaaaatgttaacactggggaatctaggtgaaaggtatatgggacccctctgtattattattgtactactaatatttttcatagctgtaaaattatttttaagatagaaattttaaagtacagttgacccttgaacaacctggggtgttaatccatgtataacttatagttggtcctctgtatccacagtgcctccacattcacggagtcatacaaccatggactatgcagtactgtggtatttactattgaaaaatatttgcatgtaatgcaaatggattgaggcagttcacacccatgtggttcaatggtcaaaggtataatatcctttttag

SEQ ID NO: 14996 - DNA, 417 bp, Bos taurus
  unsure (367): unsure at all n locations; Clone ID: 64-LIB3058-031-Q1-K1-H8
cagagtttttggggaggaaggatgggacgagacagggatgggatggaaccagtctacgtgggaaactaacccaggtttctgtattattttgcctgtttcttaaaagacctctcatcaggggttgctgtgagttttgttaatgtttgtgttgttggatttttggttaaatgaaacctgtatctggaaaattaactttttgagttttcacattgtcccaaatttctctttgcagacctttaaaccttagcccctggttgattgtgttatatttattcattataagaatgttatttaaagttggattataattgctaccttttactaattttttcatttctgtttctttttaattttatttgtattcaantttattttttttattatttaagggttttttttgtttttttttttttattt

SEQ ID NO: 14997 - DNA, 419 bp, Bos taurus
  Clone ID: 64-LIB3058-032-Q1-K1-H12
gaaatgtatgaccaaaaatcctcaatgtggcataaaggcatgaataataaagttaaaataggcagttttagcagagaagtttttcagaactacgtacttgcaaggtagaccaacaggttaaagaccaattctcagcaaaatatttcctcgatgtactgtttctcagtgtcatccacatggtggctaataatgccaacagaatgatgtttttttgttttatttttattttttttttttttcttttttttctttatttttttatttttttattttttattttctttttttttttttttttatgttttttttttattttttttttttcttcttttttttcttttattttttttatttatttttttttttatttgtatatgtatttgttattttttttaatttttttttttgatttttttttt

SEQ ID NO: 14998 - DNA, 370 bp, Bos taurus
  Clone ID: 64-LIB3058-032-Q1-K1-H8
gccccgagtgaggtgacgcggctggagttagtgccatcagcggaggactccggcctgctcgctgcctgctccagcgcctgtatctcagtccacctgctcccttcactctctccactcggagtggcaggaaaggcacctgtgtgaacacatgagaactctgagcactcacagtgttcccagtgtagcaggcgccgcctgcagtgccttcccgtgccctctcggatgtccttactcacacagacatgctgcctccccttaccgagcgtgctctgtgaaccccccttctgccatcgagatgcagttgcgaagagtgttgcatgatattagaaactcactgcagaatctttcccagtaccctatgatgagagga

SEQ ID NO: 14999 - DNA, 323 bp, Bos taurus
  unsure (45): unsure at all n locations; Clone ID: 64-LIB3058-034-Q1-K1-H8
gacccacgcgtccgctagatcgcgagcggttgcccttttttatantttttcttttttttttttttttttttggtcctatttaatgggaatcaggctttattccgcacttgtgtggggcattaacaaattcaacatacagggtagcattacatattgtaggttagcattacagcattatgcagtttcacacaattcatgttagctttttcgatttttttctttttttaaaatttgacacgtttatttaatttttggagtttcatttttacaagagaagacccaaggtaaagaaagacgaccacatcggagaaggatcacggtga

SEQ ID NO: 15000 - DNA, 266 bp, Bos taurus
  unsure (132): unsure at all n locations; Clone ID: 64-LIB3058-035-Q1-K1-H8
acgcactaatcggagccctacgagcagtagcaccaaccatttattccaagtacgctagcaattatcctgttatcaagactcctaaatagggggtcctttaccctctccacattaattactacacaagaacanatatggttaatcctcccagcatggcctctagcaataatatgatttatctcaacactagcagaaacaaaccgagctccatttgatttaactgaaagagaatcagagctagtctcgggcttcaacgtagaatatgc

SEQ ID NO: 15001 - DNA, 339 bp, Bos taurus
  unsure (132),(218): unsure at all n locations; Clone ID: 64-LIB3058-038-Q1-K1-H8
acccacgcgtccggacgcacgctaaccattaagcacctgcctcacaaacaccacaacccaaacccaagcaaggaaaaacaaaaaaggaggcggaaaagccacacaggcacaaaaaaaacaagaaccagacgncgcccacccaccggcggcccaaaacactgcagcacacgaggcaacccaaacacccgccgaagagcgcgcccaggaaaaacaaacangaccaccacgccaccaacaaaagccccctcaccacccaaccacccatgaacaaaagacaagacaacaacacaagggcacacaaagaggacgtcaaagccaaccagcaccaaaaaaaacaaa

SEQ ID NO: 15002 - DNA, 425 bp, Bos taurus
  Clone ID: 64-LIB3058-039-Q1-K1-H8
aaaggaacatgttcgttttcaagcacatcaaggcctttgaccgggcatttgctgacagcccaggacccatggtcgtgtttgcaaccccggggatgctgcatgctggccagtcactacagatcttccggaagtgggcagggaacgagaagaacatggtcatcatgcctggctactgcgtgcagggcaccgtgggtcacaagatcctcagtgggcagcgcaagctggagatggaggggcggcaggtgctggaggtcaagatgcaggtggagtacatgtccttcagtgcccacgcagatgccaagggcatcatgcagctggtgggccaggcggagccagagaatgtgctgctggtgcacggcgaggccaagaagatggagtttctgaaacagaagattgagcaggaattccgggtcaactgctacatg

SEQ ID NO: 15003 - DNA, 229 bp, Bos taurus
  unsure (63)...(64),(66)...(67),(69)...(70),(96): unsure at all n locations; Clone ID: 64-LIB3058-040-Q1-K1-H8
aaaaacaaaaaaaaaaaaaaaaaacaaaaaaaaaagaaaaaaaaaaaaaaaaaaaaaaaaaanncnntnnatgaaccatatagtaaccaatatagnaaaaaccaagaattagacagaaataaaataaaacttgaattaaaccaaaaaaccaaaacagaagggaaaaaaaaaagcgacaagcccacaaaaagagacaaaacaaaaaaaaagaaaacgacaccaacaccag

SEQ ID NO: 15004 - DNA, 431 bp, Bos taurus
  unsure (276),(313),(416): unsure at all n locations; Clone ID: 64-LIB3058-041-Q1-K1-H12
gacccactcgtccgcggacgcgtgggctgagcactgtggttgtacgcccgacgctgcgcaatgaactggacaccttctccgtccacttctacatcttctttggccccagcgtggccctccctcctgagcgcccggccgtgtttgccctgaggctgctgccagtgctggacagcggaggtgtgctcagcctggagctccagctcaacgtgagctccctgcgccaggaaaatgtgacagtgtttggatgcctgactcatgaggtgcccttgagcctgngggatgccgcagtgacctgttccaaagagtccctggncggctttctgctcacggtcaagggccgcttcagagtgggccagctgagaatcccgttttcgcagaccgggacctggttccttaccttgcgctccctgtgtggngtggggcctcggttc

SEQ ID NO: 15005 - DNA, 264 bp, Bos taurus
  Clone ID: 64-LIB3058-042-Q1-K1-H12
cgggcccctgggcttttactgatttcatatcaaaacaaaagaaaaaataataaaaaagttgtgcctgaaatgaatcttgttttttttataagtagccgcctggttcctgtgtcctgtaaaaacaggcacttgacccttggtgtagcttctgttcgactttgtatcacgggaacggattggtctgattacttgaccctcattttgaattgagcatatacaaggtccctgtccagtgaactgaaggctttgtctatgattacatga

SEQ ID NO: 15006 - DNA, 385 bp, Bos taurus
  Clone ID: 64-LIB3058-042-Q1-K1-H8
aatagagttttaaaaaacatggtaatattcctaagggaagatagttctgtcaagatagttcaccgttcccaagttttatctaaacagaaaagcaattttttgtgacctactactgtgcttaaatagctaggtgatttttaagatctttgctgagaaaaatcagagcttttgttacaaagaattctttattcagcagtctctgctttcttggaaggtagtatgatttcctaaccacatttatttagattaaataatgattttagtttctcttttgatatatccttttttttcttatgcttttttcttttattattttttttttttttcttttttttttattttttttttattttatttttttatttattatttttttatatttttt

SEQ ID NO: 15007 - DNA, 432 bp, Bos taurus
  unsure (277): unsure at all n locations; Clone ID: 64-LIB3058-043-Q1-K1-H8
caggaaaggaaaatcaagaattagtgatgtctttagaagaggagaacgctgagtcattgagaactctagaaaaggagagtcaagagccactgagatgtcaagaagtagagaaccagggaacactgagactcctagccaaagacaatcaggagccactgaggtctctagaagaagaagaccaggagacgtcaagaccgctagggaaagagaatcatgaatccctgcgggctccagaagatgagaatcatgaggctttgagacctctagaaagagacanaccagagtccctgagttctttagaagaagaccaggaggcagtgagacctccagaaagagaagaccaggagctgctgaggtctctagaaaaagaagaccaggagccactgaggtctctagaagaagaccaggaggcagtgagacctctagaagaag

SEQ ID NO: 15008 - DNA, 439 bp, Bos taurus
  Clone ID: 64-LIB3058-044-Q1-K1-H12
attgctttaggttacctcccgtcgctgctttcaaaggtgggagaaaagcaaaatccaccgccaatgagagagccaaagggcccttccatcttcattccagcaggcaagtcctcccctcctagcggctccaagccagcagtccagaccttctcccaatctgcagccagacacaggggtgtgcctcaagctctgggtctggaagaaccggaaacgatctagcttctcgagaagacaaacaccactccttgttccccagagggtctgctcacaccaccagttccatgtgaattgaaatctgcttctaaatgccctccctcccccattctggcctctgcctgcccagttcctctctggtcccaagagcagcagcggttgcctcatcctagttctcacaagcgttgggtcagcagacacgatctgagggtcccatggccacatc

SEQ ID NO: 15009 - DNA, 156 bp, Bos taurus
  Clone ID: 64-LIB3058-044-Q1-K1-H8
gatctagatcgcgagcggtttccctttttacatggtctacatgtttcatgggatgggcccactgcaagttcaacggcacagtctaggcaaagaacgggaatctcgtcatcaatgttaaggccatcaccattttccaggagcgagatcctgccaaca

SEQ ID NO: 15010 - DNA, 448 bp, Bos taurus
  Clone ID: 64-LIB3058-045-Q1-K1-H8
gagaaccccatgcgggaacttcgcatctgcaagctctgcctcaacatctgcgttggggagagcggagacaggctgacccgggcagccaaggtgctggagcagctcacgggccagaccccagtgttctccaaagctagatacactgtcaggtccttcggcatcaggagaaacgaaaagatcgccgtccactgcaccgtccgtggggccaaggcggaagaaatcctggagaaaggtctaaaggtgcgagagtacgagttaagaaaaaataacttctcagatactggaaactttggctttgggatccaagaacacatcgacctggggatcaagtatgacccgagcatcggtatctacggcctggacttctacgtggtgctgggtaggccaggtttcagcatcgcagacaagaagcgcaggacaggctgcattggggccaaacacagaatca

SEQ ID NO: 15011 - DNA, 435 bp, Bos taurus
  unsure (33): unsure at all n locations; Clone ID: 64-LIB3058-046-Q1-K1-H12
cctcattccaacctttctatataaattgttctntcttgctggtttaatgtggtatatactctagcttcacaaacctgttgctccagtataacctgcagtgtcctaactaaacttactcacttggtcttacctgcagttttttgtgtcttgtttgcttcttgaatccaattaatagaatatttctcttacccctttttaatatgtggtgtcacttgacctaatttatgtgtggaagcactacacattggtttccagttccctacacgtaagatacatgcttgtatgcagagagtatctcccttcaggcttgtaatacccttcacatggaagatcaatgagggaaatctttatattctgtataaaaacaaaatcaaatttatatactaaaatcatttgtctaaaaatttaagttggtttcaaataaaaataaaaatg

SEQ ID NO: 15012 - DNA, 373 bp, Bos taurus
  unsure (37): unsure at all n locations; Clone ID: 64-LIB3058-046-Q1-K1-H8
cggaatcccggccgaccagcgtccgggagcagaccgnatcaccgcatcttcccgggaggagaggaggcttgtgaggaactggcattggccctgtctcggagcctccagctggacacccagaggagcagccgggattcacttcagtgctccagtggctacagcacccagaccaccaccccctgctgctctgaggacaccatcccctcccaagtttcagattacgatgatttctctgtaagtggtgaccaggaggccgatcagcaggagtttgacaaatcctgcaccatcccgagaaacagtgacatcagccagtcctatcgaaggatgttccaagccaagcgcccggcctcgaccgggggccttcccaccaccc

SEQ ID NO: 15013 - DNA, 398 bp, Bos taurus
  Clone ID: 64-LIB3058-047-Q1-K1-H8
ggaaagcctaattcattattactacattgggtttgaactggacatcctaatgatgcaattgtgtaaccatcaagctgattcagggtggtgggcagactcaccatgtccctcctaagaggctgcacagcatccacaccgccattccatcgtcttctgggtcaactgttaataaaggaaaggttttctttctggcctggatttttgctgcagatgaaatcttttgaggattcccgtttcctctctttacctctcttttgctcgcactctctccctctcgctttgtcattcatggatacgttcacatgtctgctctttctttgtgtttcctccagcgcttgtctctgacatgctctttttgtttttgttttcctcccatgatctttgccaatgaccaggtc

SEQ ID NO: 15014 - DNA, 375 bp, Bos taurus
  Clone ID: 64-LIB3058-048-Q1-K1-H8
gttctagatcgcgagcggccgcccgataaatttttttttttttttttttttttttttggtttttttttttttttttttttttttttttttttttttttttttttttattttttttttttttttttttttttttttttttttattattttttttatttatttttatttttattattttttattttaaaaaataaaaaaaaaaaaaaaaaaatatatattttttttttaaaaaaaaggatggaaaaaaaaataaaaaaaaaaaaatttaaaaaaatactgtgatgaataaaaatattcaaaaataaaaaaaaaaattttatataaagatttttaaacaaatgataacaaaataaaattcaaaaaaaaaggggaatat

SEQ ID NO: 15015 - DNA, 402 bp, Bos taurus
  Clone ID: 64-LIB3058-049-Q1-K1-H12
gacccacgcgtccgaggtcgggcagctggatcagcacctcattgacgggtacctgtctcacaccgagctggccccactgcgcgccccccttatccccatggaacactgcaccacccgctttttcgagacctgtgacctggacaacgacaagtacatcgccctggacgagtgggccggctgcttcggcatcaaggagaaggacatcgacaaggacctcgtgatctaaagccatgcctcctcctgcagaaccagattctctctctttgaccttccccctcctgttttccccaatgtttaaaatgtttggatggtttgttgttctgcctggggtcaaggtgctaatatagacttaaacgaatacattaacggtgctaaacacagacattttaaccccaagtcacg

SEQ ID NO: 15016 - DNA, 345 bp, Bos taurus
  Clone ID: 64-LIB3058-050-Q1-K1-H12
tcgaatgaggacgaaggtccgcagtccatttactgccgacaaggaccatgcatcccatcccaaacctcataagactgacagtggagccaaggcatgagccccctgccagagggctcacagtggcgccaggaccgtcttcattcagacttagcagctgcacgcatccatggccgacacatttctggagcacatgtgccgtctggacatcgactcaccgtccattacggcccgaaacaccggcatcattagtaccaacggcccagctactaaagcagtggatacatttacagagatgattaaatatggaatgatatgtacacgatagaacatcatttatggaaccct

SEQ ID NO: 15017 - DNA, 423 bp, Bos taurus
  Clone ID: 64-LIB3058-052-Q1-K1-H8
tagatcgcgagcggccgccctttattttttttttttcttatcctctcatcattgaggctatgtattaatagacattatagtaaacccacgcgaaatattcagaattagaaggggattaaagagccacgtttgggcgttacgttgactattcctcattttcatcctaaggggggttgtgacgccagtgtggggacttcgtgggggtctggtggaagagatgctgaaatcaaaaggtgggaatcagtaggttatgggggaagcacgggagatgtcagctggggttagaaaagagtgggatagaggacccctccccgtcctcactggggccggcacccagtccggcagcgattcgggaaaagcgagtgtactggtcagtgggtttctgggaggaagcaggtggggtggttatctttccccaggggt

SEQ ID NO: 15018 - DNA, 430 bp, Bos taurus
  unsure (378): unsure at all n locations; Clone ID: 64-LIB3058-053-Q1-K1-H8
cgctgtgaggcacctgccaagaacatcttcaccagcctgcatgagatctgctctaagatcatggccgaaaggcgtaatgcccgctgcttggtaaacggactctccctggaccactctaaacttgtggacgtccctttccaagtggaattcccagcacctaagaatgaattggtgcaaaagttccaagtctattacctggggaatgtgcctgttgctaaacctgttggggtagacgtgataaatggggccctggaatccgtcctgtcctccagtagccgtgagcagtggaccccaagtcacgtcagcgtggcccctgccactctcaccatcttgcaccagcagacagaggcagtgctgggggagtgccgggtgcgcttnctgtcctttctggccgtgggcagagatgtccacacgtttgcattcatcatgg

SEQ ID NO: 15019 - DNA, 413 bp, Bos taurus
  Clone ID: 64-LIB3058-054-Q1-K1-H12
gcccgttcgacagatagccgtaacttctgtgctgtgccagccgcatccctgagacaagatggtgaaggtcggagtgaacggattcggccgcatcgggcgcctggtcaccagggctgcttttaattctggcaaagtggacatcgtcggcatcaatgaccccttcattgaccttcactacatggtctacatgttccagtatgattccacccacggcaagttcaacggcacagtcaaggcagagaacgggaagctcgtcatcaatggaaaggccatcaccatcttccaggagcgagatcctgccaacatcaagtggggtgatgctggtgctgagtatgtggtggagtccactggggtcttcactaccatggagaaggctggggctcacttgaagggtggcgccaagagggtcatca

SEQ ID NO: 15020 - DNA, 443 bp, Bos taurus
  Clone ID: 64-LIB3058-054-Q1-K1-H8
ctttcttttgctgaactcctttcctctcaagaaggcaatgttgagccgaaagcgtgcgtcccagtgtctcacacctgtgctctttaaacacagagacctgccaagacgccctctcgtccaactatgcccaggccgaagtcctcaccctctcttaaagcggcaccaacgtgagagagacaggcagacagacagaaagccagaggcttagggcaactctggaacccaggcaagaatctttcgctgggaaagactcatatccttgattgcacaggactgatggaaacctcccacgtgaccctcgggcccagagccatcgggtctgatgttcttgttctgttgtacattgaagagatatatatgcacatatagtatctatattcatacatactatactattgtgtgtagtgcacgtgctcttggtggtctgtcttcttcgttaggct

SEQ ID NO: 15021 - DNA, 409 bp, Bos taurus
  unsure (350): unsure at all n locations; Clone ID: 64-LIB3058-058-Q1-K1-H8
gcggttgcctttcccagctcagagcctcagcccggagccattgccccaagaggaggagaagctgcccccacggaatgccaacccagggatcaagtgtttcgccgttcgctccctaggctgggtggagatgaccgaggaggagctggcccctggccgcagcagcgtggcagtcaacaattgcatccgtcagctctcctaccacaaaaacaatctgcacgaccccatgtctgggggctggggcgagggaaaggacctgctgctgcagctggaggatgagacgctgaagctggtggagccacacagtcaggccctgctgcacacccagcccatcgtcagcatccgcgtgtggngcgtcgggcgggacagcggaagagagagggactttgcctacgtagctcgcgataagctg

SEQ ID NO: 15022 - DNA, 416 bp, Bos taurus
  Clone ID: 64-LIB34-001-Q1-E1-H8
ccacgcgtcagaaaatgtcctctcggcttgtttgcatcagtgattatgaacaacatgctaaatctgtacttcagaagtctatatatgactattataaatctggggcaaatgatcaggaaaccttggctgataatattgcagcattttccaggtggaagctatatccaaggatgctccggaacgttgctgaaatagacctgtcgacttctgttttagggcaaaaagtcagcatgccgatctgcgttggggccactgccatgcagtgcatggctcacgtggatggggagcttgcaacggtgcgagcctgcaggtcactgggaactggcatgatgttgagttcctgggggcactcctcaattgaggaagtggcagaagctggtcccgaggcgaatcgctggctgcagctgtacatctac

SEQ ID NO: 15023 - DNA, 412 bp, Bos taurus
  Clone ID: 64-LIB34-003-Q1-E1-H8
gtagccccctggagagggcgtgcctggtcatgatggacaagatgggagagaatgtccccatggagagaacggggatccaggttcaccaggacctgcagggcgagcaggaaggcctggatgggttggccctattgggccgaaaggagacaatggctttgttggagaacctggaccaaagggagacactgggccacgtgggcctccaggtatgcctggaccagctggaagagaaggcccctcagggaagcaggggagcatgggacctccaggcacaccaggccccaaaggagagactgggcccaaaggaggagtgggtgccccaggcatacagggcttcgcaggcccctcgggtctcaaaggagagaaaggtgcccccggggagactggagcccctggacgtgctgggggtaca

SEQ ID NO: 15024 - DNA, 388 bp, Bos taurus
  Clone ID: 64-LIB34-004-Q1-E1-H12
gttacggattcacaggaagttgtaaaaatacagagaggtcctgcgtatccttcacccagtttcccacaaaggcagctagtacaagagcaaagacagaagtcagaccttggtacaacccgcagcgctgacttggatgtctccagttttacaggcatgcgtttgcgtgtgtgtagttctgtacctggtacaaccgacagagctgactctgttgtctccagttttacacacatgcatttgtgtgtgtaggtagttctgtgtagttccatcatgtgtgaaactgaaattcgctcagtcatgtccgactctttgtaacctcatggactatacagtccatggacttctccaggccagaatactggagtgggtagcctttcctttctccgggaga

SEQ ID NO: 15025 - DNA, 251 bp, Bos taurus
  Clone ID: 64-LIB34-004-Q1-E1-H8
atagagagaagatttgtgagtagaggtgacatgcctaacgagcctggtgatagctggttgtccacacaatgaatctgagttcaactttaaagataccaaaagttcaaatacaccccactgtagctttaaaagttagtcaaaaaaggtacagccttttagaaacggatacaaccttgactagatagtcccatttatcactaccatagtaagcctaaaagcagccatcacttaagaaagcgttaaagctcaac

SEQ ID NO: 15026 - DNA, 410 bp, Bos taurus
  unsure (393): unsure at all n locations; Clone ID: 64-LIB34-005-Q1-E1-H12
gcggtgctgacggacgctggagcggacttgcggcgggaccagaggcgtgagagcagcagccatgtcagcggaactggagacctcagaggggttggatgagccagagaaaaagacctccggggtcccagagaaggaaaaccacaccaggatggcagacctttccgagctcctgaaggaagggaccaaggaatcacatgaccgggcggaaaacacccagtttgtcaaggacttcttgaaaggcaacatcaggaaggagctattcaagctggccaccaccgcgctgtacttcacctactccgccttggaggaggagatcgaccggaacaaggaccacccagcctttgcccccttgtacttccccacggagctacaccggaagaaggcgctgatcanggacatggagtatctct

SEQ ID NO: 15027 - DNA, 433 bp, Bos taurus
  Clone ID: 64-LIB34-005-Q1-E1-H8
ggtcgaccgacgcgtcaggcgtccgcgaagctctcatggaccctgaaggcctggcgcatctgctgcctcctgccactctggccgccctggcagacagctggctccaagaggactgcccaggcctcaactacgtggccttggtctcggggacagccccctcgcaggcggtgctgtgggccaagtccccaggggtgctggcagggaggcccttctttgatgccatctttgcccaagtcaactgccaggtctcctggtttctccctgagggatcaaagctggtgcctgtggccaaggtggccgaggtccggggccctgcccactgcctgctgctgggggagcgggtggcccttaacacgctggcccgctgtaacggagttccagcatggctgccgctgcggtagagaccgccaggggggacgggctgggctggaca

SEQ ID NO: 15028 - DNA, 415 bp, Bos taurus
  Clone ID: 64-LIB34-006-Q1-E1-H8
gccagagaggcctacaacctgggggtcaggtacataggtgggtgctgtggatttgaaccctaccacatcagggcaattgcagaggagctggctccggagaggggatttttgccactggcttcagaaaaacatggcagctggggaagtggtttggatatgcacaccaaaccctggattagagccagggccaggaaggaatactgggagaatcttcagatagcctcgggcaggccgtacaacccttccatgtcaaagccggacgcctggggagtgaccaaaggaacagccgagcttatgcagcagaaggaagccacaacggagcagcagctgagagagctcttcgaaaaacagaagttcaagtctgcacagtagcctcgatggaaaccatttttagtgacttcctccaagcttgggc

SEQ ID NO: 15029 - DNA, 399 bp, Bos taurus
  Clone ID: 64-LIB34-007-Q1-E1-H12
tgccagcctcctgcgctcagaagagactaaggaaaatgagcgtttcacagtaaaagctgaagggaaaggacaaggcaccttgtcggtagtgaccgtgtaccatgccaagctcaaaggcaaagtctcctgcaaaaagttcgacctccgggtttccatacgcccagcccccgaaacagtcaagaagcctcaggacgccaaaggttccatgatccttgacatctgtaccaagtacctgggagaccaggatgccactatgtccatcctggatatatccatgatgacaggcttctcacctgatgttgaagacctcaaaacgctgagcactggtgtcgacagatacatctctaagtatgagatgaacagagactccaacaagaacacactcatcatctacctgga

SEQ ID NO: 15030 - DNA, 414 bp, Bos taurus
  Clone ID: 64-LIB34-008-Q1-E1-H8
gcgggccgccagccacagaatacaattgatgtcaagaccacccccttctcattccacaacgaacagcctgacacacgcacggggcatccgcccgccagtagtcggtcttgtaaatgcgcagtgtcgcagtgcccaccgtctgttgcctcagcctcgcccctgcccgccccgccccgtgctgtggacatctgggcccaccagtccccacaccggccctgaccagtgaggacgccggcctccggccgcccccgcccatctgccctagagtgctctgtgtataacgatgaactactgttgtcattttctcttcactggatgtttatttataaagatttgacctgttcatacgtctgtggagcaactctccgtcgcacaactctatactaatcttaagtagactgttgttgcgttgtg

SEQ ID NO: 15031 - DNA, 269 bp, Bos taurus
  Clone ID: 64-LIB34-009-Q1-E1-H8
cacaagtccgactcgagcagggagctggtggctcttccatccccagaccagccaagcctgtgagtgacaccccagacagaggaaccacagccatgcggagtctcagcggactgctgttgttactgactgcctgcctggcggtaaacgccagctccgtgcccacattgcccgatgacattcaagtgcaggagaacttcgacctgtctacgatctatgggaagtggttcaatgtggccgtgggctccaactgcccatggttgactaggttc

SEQ ID NO: 15032 - DNA, 381 bp, Bos taurus
  Clone ID: 64-LIB34-010-Q1-E1-H12
gcggcggctctggatccactgcccacaccccgctctcgcaggcagacatgatgacagagagaatgtcccccctcctggctctggggatcctggtggctgggctctgctccagggtccactgcctcccagagaatgtgaccccagaagaacagcacaaagtgacatctgtggatggccactcattagcctccagcaacactgacttcgccttcagcctctacaagcagttggctttgaaggaccccaataagaacgtcatcttctcccctctgagcatctccatagccttggccttcttgtccctgggggctcatggccccactgtgacagagatcctggaaggtctcaagttcaacctcacagagacccccgagacagaaa

SEQ ID NO: 15033 - DNA, 266 bp, Bos taurus
  Clone ID: 64-LIB34-010-Q1-E2-H8
agaaaatcagtggtatttttgcctttacggtgaaagattgccctgcgggtaatgaagtcacctgggtggtggacatgacatctgacattagatcagtgctccctaactcagatatgaaggacgactgcataattaaactggacgactccaacatattggctttgatgactggtaacatgaatcatcagaaggacttctttcagagcaacttgaacatcagtggcaacatgcgtctggctatgaagttacaccatctccaacatcag

SEQ ID NO: 15034 - DNA, 419 bp, Bos taurus
  Clone ID: 64-LIB34-011-Q1-E1-H8
actgggaatccaggatggtgaccttgacgggcaccttgccctccctcctgctgggaaccctgctcacgttcacctccgggggcctgggggccaatcccggccttgtcgtcaggatcaccgaccagggcttggagtacgtggcccaagaggagctgttggctctgcagagtaagctgcacaaagtcacactgcccgacttcaacggggacgtcaggatcaaacattttggcagtgtggactatagattccacagcctgaacattcagagctgtaagctgcttggctccgctctgaagctcctccccaatcagggcctgcatttctctatctccgactccttcatccaggtcacgggcgactggaaggtgcgcaagaggatactgagactagacggctcctttgacgtgaaggtcaagggc

SEQ ID NO: 15035 - DNA, 429 bp, Bos taurus
  Clone ID: 64-LIB34-012-Q1-E1-H12
ggtccacccacgcgatccaaaggagacgtgcagtgggaaaccctttgatgccttcactgacctcaagaatggttccctctttgccttccgagggctgtactgctatgagctggatgaaaaggcagtgaggcctggataccccaaactcatccgagatgtctggggcattgaggggcccattgatgctgccttcacccgtgtcaactgtcagggaaagacatacctcttcaagggtagtcagtactggcgctttcaggacggtgtcctggagcctgacttcccccgaaacatctcggacggcttcgggggtattccggatgatgtggatgcagccttggccctccccgctcacaacttcaacggcagggagcgggtctacttcttcaagggcaaccactactgggaatatgtgttccagcagcagcccag

SEQ ID NO: 15036 - DNA, 365 bp, Bos taurus
  Clone ID: 64-LIB34-013-Q1-E1-H8
gtcaagccacgcatccaatctgatgatgagctgcatgaaatgactgatgaagctgatcgagatggatactgcgaagtcaatgagcatgagttcctgcgcatcatgcagtatacaagcctttattatagatcagtcgtcaccttgtctaccatgacgcacagggaacgcggattagtgccggccattgtgttaaacctgccattttgaaactgtgtagtatatttcaccactgacatctcactataactttagtaatatctcaaaatctaatgtcaacttttgaaagtgttctttgaaattgatgttctttgtaatgtgatcgggtgacatgctttaattccgcattgcagaacaatagcatatta

SEQ ID NO: 15037 - DNA, 281 bp, Bos taurus
  Clone ID: 64-LIB34-014-Q1-E1-H12
aataacttgattgccttttctaatggagtatttggcagtaattgtgatcatgctccttttgatgcaatggttctggtaaaagtctgctattatgttgatgagaacattcttgagaatgaaggaagatggaagggctcagaaaaagtacgggatataccggttccagaggagcttgttttcactgtggaggaaaaagtattaaatgacatcaaccaagctaaggcccagtatttcaagcaggtgtccgatctccagcttgtggtatatgcctttacgtcttt

SEQ ID NO: 15038 - DNA, 415 bp, Bos taurus
  unsure (342): unsure at all n locations; Clone ID: 64-LIB34-014-Q1-E1-H8
agaggctgaagctagttaacatcagtgtcttggctcccaactggctcccaattcctggtgaaactcctaaagggagactgttaaatcatgaaattaatcaccatccttttcctttgttccaggctgctaccaagtttaacccaagagtcttctcaagaaatcgactgcaacaaccaggatgtatttaaagctgtggacgctgctctgacaaaatacaacagtgaaaacaagagtggcaaccagtttgtattgtaccgcataaccgaggttgccagaatggataatcctgacacattttattccttgaagtaccaaatcaaggagggcgactgtccttttcanagtaacaaaacttggcaagactgtgactacaaggactctgcacaagctgccacaggaaagtgcacagcgaccg

SEQ ID NO: 15039 - DNA, 410 bp, Bos taurus
  Clone ID: 64-LIB34-015-Q1-E1-H8
cctttactatgctaataaatataatggagtttttcaagaatgctgccaagctgaagataaaggtgcctgcctgctaccaaagattgaaactatgagagaaaaagtactgacttcatctgccagacagagactcaggtgtgccagtattcaaaaatttggagaaagagctttaaaagcatggtcagtagctcgcctgagccagaaatttcccaaggctgagtttgtagaagttaccaagctagtgacagatctcacaaaagtccacaaggaatgctgccatggtgacctacttgaatgcgcagatgacagggcagatcttgccaagtacatatgtgataatcaagatacaatctccagtaaactgaaggaatgctgtgataagcctttgttgggaaaatcccaatggaatg

SEQ ID NO: 15040 - DNA, 413 bp, Bos taurus
  Clone ID: 64-LIB34-016-Q1-E1-H12
gaaagcatcgactctgggtttttttcttttttttttcctttgggaaacatccttcaaaccgggactgttcttgaacatgagcaggaaaaccgctggtgatgctttacaaatttttctcatcttgcctgttgacttggatagatttgagaatgggcggaaggaggaggaaaactcagttctcaagattctagatgaactgtcaggacagacttcctggtaggattacggtccagtttttaccaaagaaccaatttgaatgttggaatctaactttttataccgtcgttattattgtcactgttaactgatttgaaatgaatctttgtctcttctgtttcatttttctcagattgctttcaggagctagcatgaaataacactcaaatcttaggaccttagacgattttgcttcc

SEQ ID NO: 15041 - DNA, 377 bp, Bos taurus
  Clone ID: 64-LIB34-016-Q1-E1-H8
gcttcacactgagaggcaggcagagaacatcatacacacctgaaaggaaactcagaggagggaatcgccaagaaaagtggacatggagctaaacacaaagttttccgtggaaacctgggttcgcctggctatcagcctggtgctcctcgatcaatatggaacttaatcacatggactgtttaaaaagctgggggttcctggcccaagacctctgcctctttttggaaacgttctatcctagcgaaagggtgtttgtgagtttgatgaagaatgttttaaaaactatgggaaaatgtgagggatatttgaaagtaaacatcctctgttggttaacacggatccagacatgatcaaaacagtactagtgaaagaatgtt

SEQ ID NO: 15042 - DNA, 402 bp, Bos taurus
  Clone ID: 64-LIB34-017-Q1-E1-H12
gggagaagagcaggctgtctaagcagcacctccccgtcctcttcgcctctcttctcctcacctcgctctcgccgcctgctcgccccgccgctttgctcggcgcccaaaacaccttccaccatggccacctcggcgagctcccacttgaacaaaggcatcaagcaggtgtacatggccctacctcagggtgataaagtccaagctatgtacatctggatcgacggtactggagaaggactgcgctgcaagacccgaaccttggattctgaacccaagtgtatagaagagttgcccgagtggaattttgatggctctagtacttttcagtctgaaggctccaacagtgacatgtatcttgtccccgctgccatgtttcgggaccctttccgcaaggaccccaac

SEQ ID NO: 15043 - DNA, 407 bp, Bos taurus
  Clone ID: 64-LIB34-017-Q1-E1-H8
gctcggagccccgggcccgccgacaccatgagttggtcctcgcaccctccgagtgtaatcttctacattctttcattgctttcttcagcatgcctggcatatgttgctacccgagacaactgctgcatcttagatgagagatttggtaattattgcccatctacctgtggaattgcagatttcctgaataattaccaaaccagtgtagacaaagatctacgaactttggaaggcatcttatatcaggttgagaacacaacatcagaagccagagagctggtcaaagcaatccacatcagctataaccctgatgaaccatcatagccatatagcatagagagtgctaccacgaattccaggagtatgatggaataaagtaggagatatgagccactgattacaacaca

SEQ ID NO: 15044 - DNA, 353 bp, Bos taurus
  Clone ID: 64-LIB34-018-Q1-E1-H8
ttcccgggccgaaacacgcgtcagctctgggcatttgatgctgtcaaggggaagtgcgtccgcttcagctatgggggctgcaagggcaatggtaacaaattttactcggagaaggagtgtaaggagtactgtggcattcctggtgaagcggatgaggagttgctgcgcttctccaactgaccggtccgcaggcctgaagtccacaaggcagcaggaagtgggagggtcagagtctgccccagagccctgctgcaggttccaataaaaaccaaattgtagactcctgaaaaaagaaaaaaagtaggaacaaaggagagaggggggaggcgagagaggacggaggagcaagagag

SEQ ID NO: 15045 - DNA, 369 bp, Bos taurus
  Clone ID: 64-LIB34-019-Q1-E1-H12
agccaaaccttaccttaacagctctggtctataccattcccttgcattttaatatattgttttgttttataaccacttctaaatattatttctttcctttttttttttggttttcagttagagagttttgttttttgtttcctgtttactttgtgtacaactacctgctttttgtgactcattttgatcaaatgatagtgaacaaagccagccacagctggtaggtgctgttcactggaacaggtgctgttgtgcggaaaggagactctgtgactaattttgatagtggctttccttcgtccggatgcttcccattgggttcttagaagtcaatatttacagagttttcagtttgcggtaaatacactg

SEQ ID NO: 15046 - DNA, 391 bp, Bos taurus
  unsure (267): unsure at all n locations; Clone ID: 64-LIB34-021-Q1-E1-H8
tcaaatcgaacacgtcttgccaaacttcttagattccagtcttctcaccatccaagtgacatgactagtctagaccagtatgtggaaagaatgaaggagaagcaggacaaaatctacttcatggctggggccagcaggaaagaggccgaatcttctccctttgttgagcgacttctgaaaaagggctatgaagtgatttatctcacagaacctgtggacgaatactgcattcaggctcttcccgagttcgacgggaagaggttccanaatgttgccaaagaaagagtgaagtttgatgaaagtgagaaaagtaaggagagtcgtgaagcagttgagaaagaatttgagcctctgctaaactggatgaaagataaagccctcaaggacaaga

SEQ ID NO: 15047 - DNA, 371 bp, Bos taurus
  Clone ID: 64-LIB34-022-Q1-E1-H12
cggacgcgtgggcacaaaactttggcacaatgaagtgggtgacttttatttctcttctccttctcttcagctctgcttattccaggggtgtgtttcgtcgagatacacacaagagtgagattgctcatcggtttaaagatttgggagaagaacattttaaaggcctggtactgattgccttttctcagtatctccagcagtgtccatttgatgagcatgtaaaattagtgaacgaactaactgagtttgcaaaaacatgtgttgctgatgagtcccatgccggctgtgaaaagtcacttcacactctctttggagatgaattgtgtaaagttgcatcgcttcgtgaaacctatggtgacatggctgactgc

SEQ ID NO: 15048 - DNA, 340 bp, Bos taurus
  Clone ID: 64-LIB34-023-Q1-E1-H8
agcagacacgtgggtttgcaggagaagcagaagcatctgggcctgggtttcctgaaatcatcacacctgcagcagaaggaaaatgactgagttgaagtacatttctggattcgggaatgagtgtgcctcagaggaccctcgttgcccaggtgccctgccagaaggacagaataatcctcaagtttgcccctacaatctgtatgctgagcagctctcaggatcagctttcacttgtccacggagcaccaataaaagaagctggctgtataggattctaccttcagtttctcacaagccttttgagttcattgaccaaggccacatcactcacaactgggat

SEQ ID NO: 15049 - DNA, 363 bp, Bos taurus
  Clone ID: 64-LIB34-025-Q1-E1-H8
agaggaggcagcgttttctgggcttctctctggttctctctctccagaaggttctgccggttcccccagctctgggtacccggctctgcatcgcgccgccatgatgggtcatcgtccggtgctcgtgcttagccagaacacaaagcgtgaatctggaagaaaagttcaatctggaaacatcaatgctggcaagactatcgcagatatcatccgaacatgtttgggaccgaagtctatgatgaagatgcttttggaccccatgggaagcatcgtgatgaccaatgatgggaatgccattcttcgagagattcaagtgcaacatccagcagccaagtcgatgattgaaattagccggacacagga

SEQ ID NO: 15050 - DNA, 199 bp, Bos taurus
  Clone ID: 64-LIB34-026-Q1-E1-H8
atctagattgcgagcagccgcccctcccctcccctctgtaaacaaaaaaaaaaacccttcagtatacgtaaaaaacatacatggggatcagtgaatctgcttgtactcaaatgtatgtcttctctggagttttctaaggaatcatttgaggcttaggattccagactttgacttattaaaatatgtatagttacccgtt

SEQ ID NO: 15051 - DNA, 411 bp, Bos taurus
  Clone ID: 64-LIB34-027-Q1-E1-H8
cgcgctcggacccgcggccaggcttgcgcgcagctcccgacaggcggactcccgagcgagatggagtgggtgtgggcgctggtgctactggcggcgctgggcagcgcccgggcggagcgcgactgccgggtgagcagcttccgagtcaaggagaacttcgacaaggctcgcttcgccggcacctggtacgccatggccaagaaggaccccgagggcctgtttctgcaagacaacatcgtcgccgagttctccgtggacgagaatggccacatgagcgccacggccaagggccgagtccgtctcttaaataactgggacgtgtgtgcagacatggtgggcaccttcacagacactgaggaccctgccaagttcaagatgaagtactggggcgtagcgtcctttcctcagaaa

SEQ ID NO: 15052 - DNA, 417 bp, Bos taurus
  Clone ID: 64-LIB34-028-Q1-E1-H8
tcacggatcgatccacacgtccgaactcatgcttatcatatagtaaacccaagcccttgacctcttacaggagctttgtctgccctcttaataacatccggcctaaccatgtgatttcactttaactcaatgagcctgctaataattggcctaacaacaaatatactaacaatataccaatgatgacgagatgttatccgagaaagcaccttccaagggcaccataccccagctgtccaaaaaggcctccgttatggaataattctttttattatctccgaagtactattctttaccggatttttctgagctttctaccactcaagcctcgcccccacccctgaactaggcgggtgctgacccccaacaggcattcacccacttaaacccctaaaagtcccactgctcaacacctct

SEQ ID NO: 15053 - DNA, 375 bp, Bos taurus
  unsure (250): unsure at all n locations; Clone ID: 64-LIB34-030-Q1-E1-H8
ggcgtgatgaccgccgaggagacgaaggcggccgagagcggagcgcagtcggcgccgctgcgcctcgaaggggtggacatcagccccaagcaggatgaaggggtgcttaaggtcatcaagcgagagggcaccggcatggagacacccatgattggggaccgagtctttgtccactacacaggctggctgctcgatggcaccaagttcgactccagcctggaccgcaaggacaggttctccttcgacctgnggaaaggggaggtcatcaaggcttgggatattgctgtagcgaccatgaaggtgggtgaagtgtgccatatcacctgcaagccagagtacgcctatggcttagcgggcagccccccgaagatccct

SEQ ID NO: 15054 - DNA, 411 bp, Bos taurus
  Clone ID: 64-LIB34-032-Q1-E1-H12
ctcttccatccccagaccagccaagcctgtgagtgacaccccagacagaggaaccagagccatgcggagtctcagcggactgctgttgttactgactgcctgcctggcggtaaacgccagctccgtgcccacattgcccgatgacattcaagtgcaggagaacttcgacctgtctaggatctatgggaagtggttcaatgtggccgtgggctccacctgcccatggctgaagaggttcaaggagaagatgaccatgagcacagtggtgttgaaagcggggccgacgagcaaggagatcagcgtcaccaacactcacaggcggaaaggtgtctgtgaatcgatctctggtacttatgagaaaacaagcactgatgggaagtttctctatcacaaagccaagtggaatatcac

SEQ ID NO: 15055 - DNA, 390 bp, Bos taurus
  unsure (163): unsure at all n locations; Clone ID: 64-LIB34-032-Q1-E1-H8
gtttgcctggagaatcccatgggcggaagagcctggtgggctgcagtccatggggttgctaagagtcggacacgactgagcgacttcgctttcacttttcgctttcatgcattggagaggggaatggcggcccactccagtgttcttgcctggagagtcccanggacgggggagcctggtgggctgccgtctgtggggtcgcgcagagtcggacacggctgaagtgacttagcatagcatgtcccatgaaatatttggaacatctttatactaaaacatcatttgttttatatctgaaatttaacttcactgagcataatgtatttatctggaaacccaaagtgtacccttataactgataacattatcagtcccaccggagaaagtgac

SEQ ID NO: 15056 - DNA, 425 bp, Bos taurus
  unsure (273): unsure at all n locations; Clone ID: 64-LIB34-035-Q1-E1-H8
ccaggggccagccacgcgtccgaaaggctgctgatgccaagcggtacacgcggcgtcccctggtggtcgtctactacagcgtggacttcagcttcgactaccgcgcggccactcagttctggcggaacaaggtcctggaagtggccaaggacttccccgagtacaccttcgccgtggccgatgaggaggacttcgccacggagttgaaggacctggggctaagcgagagcggggaggaggtgaacgcggccatcctggatgagggccccgcangtttgccatggagcccgatgacctcgacgccgacgccctgcgcgacttcttcaacgccttcatcaaatgaaaactgaagccagtcaacatatcccatccggtgctcaatagcaacaacgggccggtcaatgtcgtcgtggtgaagacctttg

SEQ ID NO: 15057 - DNA, 425 bp, Bos taurus
  Clone ID: 64-LIB34-036-Q1-E1-H8
gggccgacccacgcgtccagtgtgaaatgcccatgccacagacagtccgccttcactgtgaagctcagtggccaattgccgtccccttcaaagcctgtgcccttcacataggtcctgtacaatgcccagagatacttacaggatgacactggggtcctcacatgcagggtgccaagaaattagcatttcctccttgatgtggatctccatcactgcaatgtgactgttcaactgatgagggacaaaagttctgtcgtacaaaaccatcacgtctccaccaaagagcccaggagtctctctggcatgttgaccctgccgctgcacgtaggtgataatgtgtggctggaaacacatgtggagactgaaaatccggagcaagcccgagttagaatttatttctctgggttcctgacatagttctgggc

SEQ ID NO: 15058 - DNA, 402 bp, Bos taurus
  Clone ID: 64-LIB34-037-Q1-E1-H8
aacaaatcaagaaacaaactgcacttgttgagctgttgaaacacaagcccaaggcaacagaggaacaactgaaaaccgtcatggagaattttgtggcttttgtagacaagtgctgtgcagctgatgacaaagaagcctgctttgctgtggagggtccaaaacttgttgtttcaactcaaacagccttagcctaaacacgacacaaccacaggcatctcagcctaccctgagagtaagaggaaaaaagagaaatgaaaactcagagcttattcatctgttttccttttctgttggtgttaaaccaacactctcactaaagaacgtaaatttctttaaatattttgcttcctttgtttgtgctacaattaataaaaaatgaaaagactctaaaaaaaaaaaaga

SEQ ID NO: 15059 - DNA, 363 bp, Bos taurus
  Clone ID: 64-LIB34-038-Q1-E1-H12
gtagcctgttacctcgtgatcatcgtagtcatcatcactcattacccttttttcaattgataattacttcaagctctgtatttggtttgttttggagattctccttttctcccctggggagtctgagcacagtcaggtgatggccaagcagggagctgagaaaagcattcttcctccagacgctgaggctgggaggaaggctgtgggcagctccggcaggggaagcactactagaatgacaacccagatctggccggtgctcggcaatggccgctgccttacacctcctcgttcaagctcagtgattagaggagagctccacgtagaactgccatcactggggactgtgctcagagaccctct

SEQ ID NO: 15060 - DNA, 424 bp, Bos taurus
  Clone ID: 64-LIB34-038-Q1-E1-H8
agaacacagagaaaatcagcatgagtactaccgggaaagttatcaggtgcaaagcagccatagtctggaagcctggtggatcattttccattgaggaggtagaagtggctccaccaaaggcaaaagaagttcgcataaagatggtggccacggcgctctgtgggactgagatgaaaatgttgaaggataaaaatcttcagcaccaacactaccctatcattatgggccatgaaggagctggaatagtcgagagtgtgggagaaggagtgagcacagtgaaagcaggagataaagttatcgcactctttctaccacagtgtggtgaatgcacctcttgccttaattctgcagacaatttttgtataaaactcaaacaggcagaaaccacctgatgtctgatgggtacagtagatttactgcaagg

SEQ ID NO: 15061 - DNA, 400 bp, Bos taurus
  Clone ID: 64-LIB34-039-Q1-E1-H8
gtcattatcaataactataacctctacatagtgttaatatgaagtttgctattaatactatgtagaggttatagttattgatagcaaacttcatattaacaaagtgttaggtaggaagcaaataccaacagcttttatatatggtatgtgcctgtacttatggtttaccattcagcagaaccaaactcacagccagcaataggtaatggaacctgactgagttccatgagtgtactacaaggccaggctctccacttctacttgaaacttggttataatagattaattataaagctacaaagctaagcataatactaacagcaagtttttcttcttgttcctcagctttctgcatatccatatcccactgctggaacaaagtcagaaactgctgagaata

SEQ ID NO: 15062 - DNA, 407 bp, Bos taurus
  Clone ID: 64-LIB34-040-Q1-E1-H8
caggagagaccaatccgaaagagtatagaagatttacgtaatactgtggactctgtttcccggacctcttcttccacctttcaatatataactctgctaaaaaacatgtggaaaggaaggcagaatcaattacaagataatgaaaatgtagtaaacgagtactcctcacatctggaaaagcaccaattatatatagatgagactgtgaagaataatatcccaactaagcttcgtgtgctccgttcaattctggagaatttgataagcaaaatacaaaaattagaatcggatgtctcaactcagatggaatactgccgcaccccgtgtactgttacttgcaatattcctgtggtgtctggcaaagaatgtgaagaaatcatcaggaatggaggtcaaacatctgaaat

SEQ ID NO: 15063 - DNA, 373 bp, Bos taurus
  Clone ID: 64-LIB34-041-Q1-E1-H8
agagaaacaatagccttggctgggcggggcctttgttggcggggcggtgtctctgctttttggtatgctgtctgggttggtcgtagctttccttccaaggagtaagcgtcttttggtttcgtggctgcggtcaccgtctgcagtgattttggagacccgggggatagggtctgccactgtttccccatctgtttgccgtggggtgatgggaccggatgccatgatcttggttttctggatgttggactttgaaccagctttttcgctctcctctttcgctttcatcgggaggctctttggttcttcttcgctgtctgccatgggagtggtttcatctgcatgtctggggttagtggtgtttcccccaacaatc

SEQ ID NO: 15064 - DNA, 335 bp, Bos taurus
  Clone ID: 64-LIB34-042-Q1-E1-H12
aatccaaatggatgcacgaaatgaagggcatggccgaccgcatcatcagcatgcggacacagctggtgtccaacctcaagaaggagggctcctcccacaactggcagcacatcattgaccagatcggcatgttttgttacacaggcctaaagcctgaacaggtggagcggctgaccaaagagttctccatctacatgacagaggatggccgcatctctgtggcaggggtcacctcaggcaacgtggcataccttgctcatgccattcaccaggtcaccaactagttcgcctggtcagcaggaacagagccaacgcttcctgtcgtcaacctccgc

SEQ ID NO: 15065 - DNA, 357 bp, Bos taurus
  Clone ID: 64-LIB34-043-Q1-E1-H8
cacaaaactttggcacaatgaagtgggtgacatttatttctcttctccttctctacagctctgcataatccaggggtgtgtttcggcgagatacacacatcagtgagaatgctcaacggctgaaagatttgggagaagaacattttagaggcctggaactgactgccatttctcagtatctccagcagtgtccaattgatgagcatgtaaaattagtgaacgaactaactgagtttgcaaaaacatgtgttgctgatgagtcccatgccggctgtgaaaagtcacttcacactcactttggggatgaattgtgtaaagttgcatcccgtcgtgaaacctatggcgacatggctgact

SEQ ID NO: 15066 - DNA, 210 bp, Bos taurus
  Clone ID: 64-LIB34-045-Q1-E1-H8
ggcattctcaaatgacctgaagcctggcatccaggaggacgtcagtaaccggcgaggcatttctgtgcagctgcacttccagacataccattcaggtgacgagatcacttctctctgacaatatgtgtctcggaaggtggagatgctgacaatgatccattagaacactggatatgagcatttaacatgttgatatctctgcatttgtga

SEQ ID NO: 15067 - DNA, 317 bp, Bos taurus
  Clone ID: 64-LIB34-046-Q1-E1-H12
aaaatcattacacctcacctggccacataattgagaagaatagcggaagacttccactcccaccatcttatgtacctgttatgctttcagaattaagtgatcgcatgacattcatggagaggatcaaaactatgttttatacactttagtttgagcttttcttcgcaacgtacaaagagaagaagtggaatcagttttacagtgaagtacgaggaagacctactaccttatcagagacaatggggaaagctgatgtgtgggtcattcgaaactactgggatttggcatttcctcgtcgagaactagcaaatgttgaa

SEQ ID NO: 15068 - DNA, 356 bp, Bos taurus
  Clone ID: 64-LIB34-046-Q1-E1-H8
tagatcgcgagcggccgctcgcgcccacgcgtccgcaacatgactgacaatgatcttatcgatattcttgaccctttttatcatctttcaactaaaagtttcaaaacacaacttttatcacaatccagaactgacaccaacaaaaatattaaaacaaaacaccccttgagaaacaaaatgaacgaaaatttatttacctcttttattacccctgtaattttaggtctccctctcgtaacccttatcgtactattcccaagcctactattcccaacatcaaaccgactagtaagcaatcgctttgtaaccctccaacaatgaatacgtcaacttgtatcaaagcaaataatgagtat

SEQ ID NO: 15069 - DNA, 413 bp, Bos taurus
  Clone ID: 64-LIB34-047-Q1-E1-H8
ggacgccatcgacggagagcggctgaagcaccttatccaaaccccctccggctgtggggagcagaacatgattggtatgacgcccacggtcatcgccgtgcactacctggacagcaccgaccagtgggagaagttcggcttggagaagcggcaggagtccctggagctcatcagaaaggggtacacccagcagctggccttcagacaaaaaagctcagcctacgccgccttccaatatcggccccccagcacctggctgacagcctacgtggtcaaggtctttgcactggccgccaacctcatcgccatagactccaaggacctctgtgagaccgtcaaatggctgatcctggagaagcagaagcctgatggaatcttccaggaggatgggcctgtgatacaccaagaaatga

SEQ ID NO: 15070 - DNA, 423 bp, Bos taurus
  Clone ID: 64-LIB34-048-Q1-E1-H12
atgaagaaaacctcacacatggattgcatcaaggctatctcgaataacgaagcagatgctgtgacgttggatggaggtttggtgtatgaggcaggcctgaagcccaacaacctgaagcctgtggtggcagagttccatgggacaaaagacaacccacaaactcactattatgctgtggcggtggtgaagaaggacactgacttcaagctgaatgagctcagaggcaagaagtcctgccacacaggcctcggcaggtccgctgggtggaacatccccatgggcaaactttataaggaattgcctgatccacaggaatcaattcagagagctgcggccaacttcttctctgccagctgtgtcccctgtgcggatcaatcatcatttcccaaactctgtcaactgtgtgcggggaaagggacagac

SEQ ID NO: 15071 - DNA, 326 bp, Bos taurus
  Clone ID: 64-LIB34-048-Q1-E1-H8
tcttgccgattacataggtgatccacaagatccagtctccaataaacggacggattgacgttccaaacgcttgctgataatatcgcactgcattgctgacgtacaatttgatgccaaagctgacaatctgcccccattaactgcagacattgccgaggattacggtttctgtgaatactatgacgaagaactatatgccatgctgcgctcatatgagtatgaagaatcaggacagcatcctgaatattctgtctcattggtactgacacatgacaatgaatatgatcccagactggatgcacgctgttccaaacatgatccacatg

SEQ ID NO: 15072 - DNA, 391 bp, Bos taurus
  Clone ID: 64-LIB34-049-Q1-E1-H12
catgtccttgatattttagaatatcttgaatgtattcttttctgtatagtgggtttgcctagggacatataaccatggggcttttctaagctaaagaaaatgagacctttatttcttttcagcttaatgaattccagatatctgaaaaagatgtgaaagcactgaaaatacaatttttaatctgtgctttagctgtttttttctttagcagaccaagttgggtgatataaatgtttgtgatatgtgccacaagatagtacatagatattacattagtattcgatctcttgttaaagggaaaagaataaaattatattgaaaatatcatttttatagtataagttcatattaacaaatggtcctcaacatctttttagataacatatttttt

SEQ ID NO: 15073 - DNA, 432 bp, Bos taurus
  Clone ID: 64-LIB34-049-Q1-E1-H8
atgggcattaggaaaatatttgccaacgctgacttgtcaggaatcacagggaccgcggacctggtagtctcccaggtggtccacggcgctgcgctggacgtggacgaggagggcacggaaggagctgctgccacgggaatcagcatggaaagaacgatcttgagaatcattgtgcgtgtcaacaggcccttcctgattgccatagttctcaaagacacccagagcatcatctttttggggaaagtcaccaaccccagtgaagcctagagctccgctctgagttgtgggtctcctccctaaagagcacggtgctcaggtcctgcgtgcagcctggcccctgggcactgaagatccaccctgcctgtcgccacctgctcagctctgaggatgtgacatggactctgctgggagctcaccatgcacatggagtct

SEQ ID NO: 15074 - DNA, 431 bp, Bos taurus
  unsure (423): unsure at all n locations; Clone ID: 64-LIB34-050-Q1-E1-H8
ctggcatggattagatttaccgcttgccattttattcattgtagtcttgccaagcgcatcagtatgtgttttagaatgaatcaagagttgtatgagtatgttggtggtaagttaggagaagtggacattgttaggtttattctctgctctgtacctgtgaaaagagtaaaaacaaaactgcttggcagtttgatttttaaattgtgttagaacataagctgtttcagaaaaatatgaaaaatgtatggctgccttttgaaatatttgatgccttgtcctacaggatactgcaaagaacatggctgtcctaaaattgtaaaaattgtataaacaagtcacaaatgccagttttctaaaaacttttcagatttttcccttgatatgaagggtaggaacatatacaggtatggagtatttgactgnaaacagtg

SEQ ID NO: 15075 - DNA, 230 bp, Bos taurus
  Clone ID: 64-LIB34-051-Q1-E1-H8
gaagaagagggcaaatggtcctgctgcatattctacatagcagagtacgcaaatattatcataataaatatctttacagcaattttattcctaggaacatcccacaatccacacataccagaactctacacaatcaattttaccattaaatccctactgctcacaatatccttcctatgaatccgagcatcctaccctcgatttcgctatgaccaactaatacacttact

SEQ ID NO: 15076 - DNA, 237 bp, Bos taurus
  Clone ID: 64-LIB34-052-Q1-E1-H1
gagatcagccacgacccttccctgaagccatggacagcatcctatgacccatgctctgccaagaccatcctaaataatgggaagacctgcacggttgtgtttgatgatacttatgacaagtcaatgctgataggtggtcccctcgccgcgccataccggatccgccagttccacctccactggggctcctcggacgatcacggctcggagcacagcgtggatggagtcaagtacgca

SEQ ID NO: 15077 - DNA, 240 bp, Bos taurus
  Clone ID: 64-LIB34-054-Q1-E1-H8
agaagcttcacactgagaggcaggcagagaacatcacacacagctgaaaggaaactcagaggagggaatcgccaagaaaagtggccatggagctaatcccaaacttttccgtggaaacctgggttctcctggctatcagcctggtgctcctctatctatatggaacttattcacatggactgtttaagaagctgggggttcctggcccaagacctctgcctctttttggaaacgttctat

SEQ ID NO: 15078 - DNA, 345 bp, Bos taurus
  Clone ID: 64-LIB34-055-Q1-E1-H8
aacagatgccggtgtctttagctccaaacgtggcaggaagcgtggtgcagcagatgggggttggaggcagggggatccatacaaagcagcgtgcagatggatagccagagcctgactccacaccgctggggaatttctgctgtccagctgctgttcttagtgaggaggcattcagaatgtcagagtgaggccagagctacgggcttctggacccctgggccggcgggccatcatggaaaaaccgtgtttggttcaatacctggagcagagcaggggaaagcccagggatgtggtgtgaggaggtgacagtttgtcccaggatatccgggactttccgagccctgt

SEQ ID NO: 15079 - DNA, 271 bp, Bos taurus
  Clone ID: 64-LIB34-056-Q1-E1-H12
taaattcttgcaacatctaagaatttagcaccatgaaacatctattactgctacttttctgtgcttttacatctcaggcccaatttcctacggaccatgacaatcggacatgatgatcagacctaatgtaggttcgggtgcccgcggtcattcagccgacatcactgacagcgaagaggcccccagcccgagacctgtgccccctctcatcagccacagtggctatcgggctcgtctcgccacatcaactgtaggccacaatacattggat

SEQ ID NO: 15080 - DNA, 377 bp, Bos taurus
  Clone ID: 64-LIB34-056-Q1-E1-H8
gcctgccactgaaccggtccaatcaactatccagcccactgctgagcccttctgcctggcgcccgtcacctcctgctctgactccgagatccgctcagcagaggcggtgctgggggacgctttgacagacttctccctgatgctctaccaggacttctcagtgttgaagatgagggagaccaacttcatcttttcccccttcagcattgccagcctcctcacccaaatcctgcttggggctggaggagaaaccagggtcagcctgtagcgcctcctcacttacccccagaacttcagctgtgtccaccacgccctgagggccttcatgtccgaaagtttcacctcgttctctcagatcttccacagctcagacctga

SEQ ID NO: 15081 - DNA, 219 bp, Bos taurus
  Clone ID: 64-LIB34-057-Q1-E1-H8
gtttggacacacagtcacacagacaggcagacgcacagggctcagggcccttgaatggaccctgccccctcccctcccaccacccagggctgtctgtgctaattctccaggcctcagcctgtttcttagcctgggatctgcgcaggattgagggacccacaagtcaaccttgagacctttggcccaactgggcctaccatgacaaaggagtatcaagat

SEQ ID NO: 15082 - DNA, 214 bp, Bos taurus
  Clone ID: 64-LIB34-058-Q1-E1-H12
gttggcaatgctctcatacaagggggttctcaactggtgggagaaaaccggagcatgaccatccatatcagcatgttcttcagcacatacgacagagacaactactgctggaaaactacatgtctcagaaagcactgttctaaagcatatggtggtcgatggtggtataaccgatgccatgcagccaatcccaatggcagatactacagtggtg

SEQ ID NO: 15083 - DNA, 207 bp, Bos taurus
  Clone ID: 64-LIB34-059-Q1-E1-H8
gggatatacttctcaggaaacactttcctgtcaagaggagaaaggagagacacagcaaacctcttccctcaaacaagtttgagtcacttcatgaagccagatactgcagggacttttgatgtggaatgcctcacaactgatcactacacaggtggcatgaaacaaaagtacactgtgagccagtgcagccagaggtccgaacgattt

SEQ ID NO: 15084 - DNA, 239 bp, Bos taurus
  Clone ID: 64-LIB34-060-Q1-E1-H8
gtcgccgcggtttcctgcttcaacagtgcttgaacggaacccggctgctcgtccccccctaccccggccggccactcagagccagccctcgtcaccacttgacagcgccctccgaccggcccaaggtccccgccaccgctccagtgccgctcggccgtcgccgccaccaccaccaccaccgcccgttttcagccgcccaccatgacgaccgcatccccctcgcaggtgcgccagaacta

SEQ ID NO: 15085 - DNA, 403 bp, Bos taurus
  Clone ID: 64-LIB34-061-Q1-E1-H8
acgagtccacggacgcgtgggctgtacttgggatatgaatatgtcactgctcttcagaatctaagagaaagtaaacccccggactcctcaaaggatgagtgcatggtgaagtggtgtgcaattggtcaccaggagaggacaaagtgtgatcggtggagtgggttcagcggcggggcaatagagtgtgaaacagcagagaacactgaagagtgcatcgccaagatcatgaaaggagaagctgatgccatgagcttggacggaggctacctctacatagcacgcaaatgtggcctgatgcctgtcctggcagagaactacaaaactgagggtgaaagttgcaagaacacaccagaaaaagggtatcttgctgtagctgtgggtaaacatcagatgctaatatcaa

SEQ ID NO: 15086 - DNA, 208 bp, Bos taurus
  Clone ID: 64-LIB34-062-Q1-E1-H8
ccgggtcgacccaacgtccgcagaccatggcgaagctgttggtgctcaccctcttgggactggggctggcattcttcagggattaccggtcttcttatctagcaagaatgaacgcttcccgagaagtaaaatcggtagaacttcctaactgtaaattaataaaaggaatagaaactggtgctgaagacctggagatacttcctaatgg

SEQ ID NO: 15087 - DNA, 233 bp, Bos taurus
  Clone ID: 64-LIB34-063-Q1-E1-H12
tgcggaggctcaaggtggtcctgggtcacctgaagggccggcccgcttcggacccggagccgcaggccaccccgtgttggagcggcgcccggcgggcgtccgcagaggatgtcctggtggtgcacgggcggcgcacggccattggccggtcgggccgcggcggcttcaaggacaccacccccgacgagcttctctccgccgtcatgaccgcggttctccaggacgtcaagctg

SEQ ID NO: 15088 - DNA, 186 bp, Bos taurus
  Clone ID: 64-LIB34-064-Q1-E1-H8
cccgggcccacccaagcgtccgaaaatactatcccatcaataggcccattcatttccctaacagcagttatactaaaagttttcaccacctgagaagcatttgcatctaaacgagaagtcttgactgtagacttaaccacgacaaatctagaatgattaaacgggtgccctccaccatatcacaca

SEQ ID NO: 15089 - DNA, 200 bp, Bos taurus
  Clone ID: 64-LIB34-065-Q1-E1-H12
gtcccacccactaataaaaattgtaaacaatgcattcatcgaccttccagccccatcaaacatttcatcatgatgaaatttcggttccctcctgggaatctgcctaatcctacaaatcctcacaggcctattcctagcaatacactacacatccgacacaacaacagcattctcctctgttacccatatctgccgagacg

SEQ ID NO: 15090 - DNA, 212 bp, Bos taurus
  Clone ID: 64-LIB34-065-Q1-E1-H8
caaggccgccgcgctatggatcgcgcgctccggctcctcgcgcgttcgcgtttactctcgcggaatccaggttccgcccccagacctggccttggcccgggtggcccagcagtcctcctgctccggcctccgaacgccgctcgaatggcaagccaaaattcttttcggatagaatatgatacctttggtgaactcaaggtcccaaatgataa

SEQ ID NO: 15091 - DNA, 232 bp, Bos taurus
  Clone ID: 64-LIB34-067-Q1-E1-H8
gacagttacaaatgccgacggtcgcacagaaacgaccaaagaagtggtaaagtctgaagatggttctgactgcggtgacgcggacttcgactggcaccatacttttccttcgaggggtaacctagatgatttctttcatagagacaaggatgatttcttcacccgtagttcacacgagtttgatggtaggacaggcttagcacccgaatttgcagccttaggggaatcgggc

SEQ ID NO: 15092 - DNA, 207 bp, Bos taurus
  Clone ID: 64-LIB34-068-Q1-E1-H8
caaggtagtgtttcagtagtctctgatccgcctctcccgcgagcccgttgtcgttggactgcaccccgggcggggacgtccgcggggcacgggaggaagccgcaatgccgatcaataaatcagagaagccggaaagctgcgataatgtgaaggtggttgttaggtgccggcccctcaatgagagagagaaatcaatgtgctacaaac

SEQ ID NO: 15093 - DNA, 200 bp, Bos taurus
  Clone ID: 64-LIB34-069-Q1-E1-H12
gttcgcacctccaatgggaaagccaaccttggctgtgatcggccttgtccattcccttggaggtgccatccccactaccgacctgcgctctcccagggcatttgatgtagctaacggaacatgccccttgccgtctgtcatcgacataatgaactcatattgctaaagcactggggaaatagctcaccattggtttggca

SEQ ID NO: 15094 - DNA, 223 bp, Bos taurus
  Clone ID: 64-LIB34-069-Q1-E1-H8
ggaaccgcctggcacagtaccgaagcgaggtgcaggccatgctgggccagtctaccgaggagctgcgggcccgcatggcctcccacctgcgcaagctgcgcaagcggctgctccgcgacgctgacgacctgaagaagcgcctggccgtctaccaagctgggggcaagcaagggttgccgaccgcagctttgagcgcccatccgcggagcgcttccgggcccct

SEQ ID NO: 15095 - DNA, 227 bp, Bos taurus
  Clone ID: 64-LIB34-072-Q1-E1-H8
agttcaagatcgcgagcggccgcccttttattttttttttatttctattgttcatcttttcatgcaaggttgtatttataaagctgtagcttcatgttaaatccaattactccatgcatcaagtcatgtcgaattcatgcataacatttaatgatgacatttcatcacagttcaaggactgacccatcatgctgatgagtccatacatagtcgtaagttatcacgtc

SEQ ID NO: 15096 - DNA, 430 bp, Bos taurus
  Clone ID: 64-LIB34-073-Q1-E1-H8
tcccgggccgacaaacgcgtccggccacatgctggagaaccacgttgaacgcctgtgggcctacctgaccatccaggagctgctggccaagaggatgaagttggagggccaggagaaggccaacgtgtcagcaaaggccctgcagatgtcattggcctatcagttcgtgaccccactgacctccatgaccgtcaggggcatgacagaccaggacggcctggagcccatcattgataagcccctggacgattatctgcccttggagatggtgggacccagaaagaccttcatgctacaggcctcccagcctgctccaacgcactccagcctcgacatcaagaagttgccagaccaagtgactggcgtggatactggaccgcacttcctcatccacgtgccccagaaagaggacacgctgtgcttcaacatc

SEQ ID NO: 15097 - DNA, 402 bp, Bos taurus
  Clone ID: 64-LIB34-074-Q1-E1-H8
aactgcattgctgaggtagaaaaagatgccatacctgaaaacctgcccccattaactgctgactttgctgaagataaggatgtttgcaaaaactatcaggaagcaaaagatgccttcctgggctcgtttttgtatgaatattcaagaaggcatcctgaatatgctgtctcagtgctattgagacttgccaaggaatatgaagccacactggaggaatgctgtgccaaagatgatccacatgcatgctattccacagtgtttgacaaacttaagcatcttgtggatgagcctcagaatttaatcaaacaaaactgtgaccaattcgaaaaacttggagagtatggattccaaaatgcgctcatagttcgttacaccaggaaagtaccccaagtgtcaactcca

SEQ ID NO: 15098 - DNA, 152 bp, Bos taurus
  Clone ID: 64-LIB34-075-Q1-E1-H8
tacaagactctagagtgagtcgtactattctcagtatctccagcagtgtccatttgatgagcatgtaaaattagtgaacgaactaactgagtttgcaaaaacatgtgttgctgatgagtcccatgccggctgtgaaaagtcacttcacactc

SEQ ID NO: 15099 - DNA, 392 bp, Bos taurus
  Clone ID: 64-LIB34-076-Q1-E1-H12
gacgagtcatataatgattgaatgtgaccagatggaagacgtttttgattgctcccacagtgaggatgcacgggcactgtgtgagaagtctcctcccaaagtgcgactggtgagaggtccccatcgttgtgaagggcgggtggaaatggaacggaatggctagtggggcactgtgtgtgatgacagctggtacatgaaagacgcggaagtggtgtgccgggagctgggctgtggaacagccaaggggacaccaagtggtaatttgtataatccattggcagatgaaaaacagtaaatcttcatccaagatgtcaactgcagtgggacggtagataaattgattgaatgtgactgggtggaagacgtttttgattgctcccacagtgaggatg

SEQ ID NO: 15100 - DNA, 361 bp, Bos taurus
  Clone ID: 64-LIB34-076-Q1-E1-H8
gacggacgcgatccgaaggatcggggagcgcgggacgcgagtgcggagctcggttttcggagcgtggctagcagctggcacgatgggcggggagcatgaggaggatcggttcgacggcatgttgctggccatggcgcagcagcacgacggcggcgtgcaagagctggtgaacactttcttcagcttccttcgacgcaaaacagacttctttgttgggaggagaagaacgcatggcagaaaagcttatcacacagaccttcaaccaccacaaccagctggcacagaaggcccggcgggagaagcgagctcggcatgagactgagcggcgggagaacgcatatcgggcagccaggttggccaa

SEQ ID NO: 15101 - DNA, 433 bp, Bos taurus
  Clone ID: 64-LIB34-078-Q1-E1-H12
ccttaaagtcccattttatgtcttaggaagccttaggagactgaaagtggagtcttctgagcattccaaatatctgcttagaaatagcatgtaataaaagggaccttattaatacactggtgttttcacttcactacatgagtggccacaagaaaactaaattaaatgtcttgattattcatgaaattctgtcatgtgatactggaatatgggctactaaatatatgtggtaatgaaaagtatgtgtatgtatatacatatatacacacagatataaagtaggacttctttgtgcccccatgtcattttcaaattataacattatgctaatttagcactatcgaagatagcaagagaatatgttgcaagaagttgacacttagacgcagtgttctgaggtcagatggatttggaccctcttggtcagaaagat

SEQ ID NO: 15102 - DNA, 414 bp, Bos taurus
  unsure (234),(238): unsure at all n locations; Clone ID: 64-LIB34-078-Q1-E1-H8
gtcgtattacgcactgcattgcggaggtacaaaaagatgccatacctgaaaacctgcccccattaactgctgactttgctgaagataaggatgtttgcaaaaactatcaggaagcaaaagatgccttcctgggctcgattttgtatgaatattcaagaacgcatcctgaatatgctgtctcagtgctattgagacttgccaaggaatatgaagccacactgaatgaatgctgtngcanagatgattcacattcatgctattccacagtgtttgacaaacttaagcatcttgtggatgagcctcagaatttaatcaaacaaaactgtgaccaattcgaaaaacttggagagtatggattccaaaatgcgctcataattcgttacaccaggaaagtaacccaaatgtcaaactcaa

SEQ ID NO: 15103 - DNA, 360 bp, Bos taurus
  Clone ID: 64-LIB34-079-Q1-E1-H12
aacctagttctagatcgcgagcggccgcccttttttttttttttttgaccatttttcttcttttattagaatttttttctttttttttttttttctcaaaatttttatctaaaaacaaaccaaaaaaaaaaaaaaaggaaaaaaagaaaaccaaaattattggaaacttcatggttcaagtggggagacgggaggaggagcatggaactgaggctcccagcctctccagaaaagtcctcaccctcgaagtgccctcttttgcagggagagcaaagccggggacaggccccccaacgcccagcctccgtctgaagagggcagagtcacagtggtccgggggccggacgggggcaaggccaa

SEQ ID NO: 15104 - DNA, 392 bp, Bos taurus
  Clone ID: 64-LIB34-079-Q1-E1-H8
aagaatcttttacgactttgaatgtagacattagaaatcaccaaaatcttcttgattctttggaacaatatgtcaaaggagatttattagaaggtgcaaatgcttatcattgtgaaaaatgcaataaaaaggttgatactgtaaagcgcttgcttattaaaaaattgcctcctgttcttgctatccaactaaaacgattcgactatgattgggaaagagaatgtgcaatcaagtttaatgattattttgaatttcctcgtgagctggacatggaaccgtacacagttgcaggtgttgcaaagctggaaggagataatgtaaacccagagagtcagttgatacaacagaatgagcagtctgacagtgagacagcaagaagcacgaaatacaga

SEQ ID NO: 15105 - DNA, 410 bp, Bos taurus
  unsure (355): unsure at all n locations; Clone ID: 64-LIB34-080-Q1-E1-H8
agtaattatttccagcaagcaagtgagctttccaagctagtgaaccaacagcttcttgctgatccacttgttccacctcagctaacaataaaagacttctacatgacagattcaattagcagagcctcacagacaatggctaaatgtgtcaaagctgttacagagggtgcccatgcagtagaggaaccatccatatgctgaaacatctactatggcccagttaatggacagttatgttggcacgatctcttgaaggtgtatctctttcaaaaataatcttgatgtaatatttaaggttctaccatgctttatttgaaaatgctattgcaattatcagagaactttgaagtttcanaacaattatgtgttgaatgtaaatggtaaatagtttaataaacattatatagagg

SEQ ID NO: 15106 - DNA, 284 bp, Bos taurus
  Clone ID: 64-LIB34-082-Q1-E1-H12
agctgggtgcacctcttgagtcagccctatcgacagcatacatgttttccgtgaaggacctctgcctgatcctgagtttggtgggtgcaattaagacaactgatggtactgatcctcgcagtggtgacttctaaactgaaggatgaggtgtgcgtggcccaagacatgtggaaagacaccagtctgcctgcacagagacaggctggcccttctgctctgatgaagactggaatacacaatgcccatctggctgcacgatgaaatggttgattgatgaagtcgat

SEQ ID NO: 15107 - DNA, 380 bp, Bos taurus
  Clone ID: 64-LIB34-082-Q1-E1-H8
gaagcttcacactgagaggcacgcagagaacatcacacacagctgaaaggaaactcagaggagggaatcgccaagaaaagtggccatggagctaatcccaaacttttccgtggaaacctgggttctcctggctatcagcctggtgctcctctatctatatggaacttattcacatggactgtttaagaagctgggggttcctggcccaagacctctgcctctttttggaaacgttctatcctaccgaaagggtgtttgtgagtttgatgaagaatgttttaaaaagtatgggaaaatgtgggggatttttgaaggtaaacatcctctgttggttatcacggattcagacatgatcaaaacagtactagtgaaagaatgtt

SEQ ID NO: 15108 - DNA, 402 bp, Bos taurus
  Clone ID: 64-LIB34-083-Q1-E1-H12
cgcgtcaggccaaaaatggagcgccacttctccacacgtgcccaagttttcgcctgaaaaatttcctctagcgggactggaggagaactattgcaggaatccagacaatgatgagaatgggccctggtgttacaccacagatccagacaagagatatgactactgtgacattcccgaatgtgaagataaatgtatgcattgcagtggagaaaactatgagggcaagattgccaagaccatgtctggacgtgactgccaggcttgggactctcagagcccacatgcccacggatacattccttccaaatttccaaacaagaatctgaagatgaactactgccgtaatcctgatggggagccccgcccatggtgtttcaccaccgacccccaaaagcgctggga

SEQ ID NO: 15109 - DNA, 396 bp, Bos taurus
  Clone ID: 64-LIB34-083-Q1-E1-H8
cccacacgtccgattgggactggggctggcattcttcagggattaccggtcttcttatctagcaagaatgaacgcttcccgagaagtaaaatcggtagaacttcctaactgtaaattaataaaaggaatagaaactggtgctgaagacctggagatacttcctaatggactcgctttcattagttccggattacgatatcctggagtaaaaagctttgaacctgataagcctggaaaaatactgctgatggacctgaacaaagaggatcctacagtgttggaattgaagatgactggaagtaactttgatgcgtcttcatttaaccctcacggcattagcacattcacagatgaagataatactgtgtacctgctggtggtgagccatccagacgt

SEQ ID NO: 15110 - DNA, 407 bp, Bos taurus
  Clone ID: 64-LIB34-085-Q1-E1-H12
gacccacgcgtcaggggggacacttctctgaattgctaacatagctttaatagacctgcaagcgtgtactcaccacattcacatcatgactgtcaatcttctagttcctccatgcggaatcagtgaaactaaatagtcttgacaggctgaatctgagtattacactatatatccgaaagaataccagcattctccgtctgatagcagcacggacgttgactagcatattgatgtctgaactcataaatacataccaatgtggcttcaatattcattatctgcatataaaagcacttaggacgaggcttatattacgggtcttacacttttctagaaacatgaaatattggagtaatccttctgctcacagtaatagccacagcatttataggatacgtcctaccatg

SEQ ID NO: 15111 - DNA, 423 bp, Bos taurus
  Clone ID: 64-LIB34-085-Q1-E1-H8
gacacacgcgtcaggctctgtggtgttcactatcatctctgcacatttgaaacctcagactctcccagatgcacctcagcgctgtgtatcaccgcatacctctaagcgatgggaacagcattcctatcatcggacttggtacctactcggaacctaaatcgactcctaaggggacctgtgcaacatcagtgaagattgccattgacacggggtaccggcacattgatggggcctacctctaccagaacgagcatgaagtgggggaggccatcagagagaagatagcagaaggaaaggtgcagagggaggatatcttctactgtggaaagctgtgggctacaaatcttgacccagagttggtccgcccaactctggagaggacactcaaggacctccagctagattatgtggatctttacatca

SEQ ID NO: 15112 - DNA, 450 bp, Bos taurus
  Clone ID: 64-LIB34-086-Q1-E1-H8
tgaaaaacaaatcaagaaacaaactgcagttgttcctctgttgccttgggcttgtgtttcaacagctcaacaagtgcagtttgtttcttgatttgtttctcagtatcgggaagtgtgcatatatctgcatggaaggtgaacaatttctcatcaaaggctttgggtacaactgaaaaccgtcatggagaattttgtggcttttgtagacaagtgctgtgcagctgatgacaaagaagcctgctttgctgtggagggtccaaaacttgttgtttcaactcaaacagccttagcctaaacacgacacaaccacaggcatctcagcctaccctgagagtaagacgaacaaagagaaatgaaaactcagagcttattcatctgttttccttttctgttggtgttaaaccaacactctcactaaagaacgtaaatttctttaaatattttgcttcg
